United States Patent Application Publication US 2026/0308639 A1, published October 8, 2026 (application 18/996,535).

The application's sequence listing, which the Patent Office published only in electronic form, follows.

SEQUENCE LISTING (20362 sequences)

SEQ ID NO: 1 - RNA, 20 nt, synthetic construct
  source 1..20: mol_type = other RNA
aaaaaactagtactcttgtt

SEQ ID NO: 2 - RNA, 20 nt, synthetic construct
  source 1..20: mol_type = other RNA
aaaaaatcagcgttaatttc

SEQ ID NO: 3 - RNA, 20 nt, synthetic construct
  source 1..20: mol_type = other RNA
aaaaaatctatttctcaagc

SEQ ID NO: 4 - RNA, 20 nt, synthetic construct
  source 1..20: mol_type = other RNA
aaaaactagtactcttgtta

SEQ ID NO: 5 - RNA, 20 nt, synthetic construct
  source 1..20: mol_type = other RNA
aaaaataaattctgacaagt

SEQ ID NO: 6 - RNA, 20 nt, synthetic construct
  source 1..20: mol_type = other RNA
aaaaatcagcgttaatttcg

SEQ ID NO: 7 - RNA, 20 nt, synthetic construct
  source 1..20: mol_type = other RNA
aaaaatcgtcagcacagagt

SEQ ID NO: 8 - RNA, 20 nt, synthetic construct
  source 1..20: mol_type = other RNA
aaaaatctatttctcaagct

SEQ ID NO: 9 - RNA, 20 nt, synthetic construct
  source 1..20: mol_type = other RNA
aaaacaaataattgtaaagg

SEQ ID NO: 10 - RNA, 20 nt, synthetic construct
  source 1..20: mol_type = other RNA
aaaacctacacgaatgtatt

SEQ ID NO: 11 - RNA, 20 nt, synthetic construct
  source 1..20: mol_type = other RNA
aaaactaaaaatcgtcagca

SEQ ID NO: 12 - RNA, 20 nt, synthetic construct
  source 1..20: mol_type = other RNA
aaaactagtactcttgttaa

SEQ ID NO: 13 - RNA, 20 nt, synthetic construct
  source 1..20: mol_type = other RNA
aaaactctaaacttgactaa

SEQ ID NO: 14 - RNA, 20 nt, synthetic construct
  source 1..20: mol_type = other RNA
aaaactgccagtaagaaatt

SEQ ID NO: 15 - RNA, 20 nt, synthetic construct
  source 1..20: mol_type = other RNA
aaaagatatgtatgatctat

SEQ ID NO: 16 - RNA, 20 nt, synthetic construct
  source 1..20: mol_type = other RNA
aaaaggcaataatttaaaca

SEQ ID NO: 17 - RNA, 20 nt, synthetic construct
  source 1..20: mol_type = other RNA
aaaaggcatcatatgagcta

SEQ ID NO: 18 - RNA, 20 nt, synthetic construct
  source 1..20: mol_type = other RNA
aaaataaattctgacaagtg

SEQ ID NO: 19 - RNA, 20 nt, synthetic construct
  source 1..20: mol_type = other RNA
aaaataagttcgctgtcttt

SEQ ID NO: 20 - RNA, 20 nt, synthetic construct
  source 1..20: mol_type = other RNA
aaaataatttggagtaaatg

SEQ ID NO: 21 - RNA, 20 nt, synthetic construct
  source 1..20: mol_type = other RNA
aaaatatttacttaggattc

SEQ ID NO: 22 - RNA, 20 nt, synthetic construct
  source 1..20: mol_type = other RNA
aaaatcagcgttaatttcga

SEQ ID NO: 23 - RNA, 20 nt, synthetic construct
  source 1..20: mol_type = other RNA
aaaatcgtcagcacagagta

SEQ ID NO: 24 - RNA, 20 nt, synthetic construct
  source 1..20: mol_type = other RNA
aaaatctatttctcaagctt

SEQ ID NO: 25 - RNA, 20 nt, synthetic construct
  source 1..20: mol_type = other RNA
aaaatgaagcatcagtttaa

SEQ ID NO: 26 - RNA, 20 nt, synthetic construct
  source 1..20: mol_type = other RNA
aaaatggctcctctcttccc

SEQ ID NO: 27 - RNA, 20 nt, synthetic construct
  source 1..20: mol_type = other RNA
aaaattcaataaacaaagac

SEQ ID NO: 28 - RNA, 20 nt, synthetic construct
  source 1..20: mol_type = other RNA
aaaattgattcccacatcac

SEQ ID NO: 29 - RNA, 20 nt, synthetic construct
  source 1..20: mol_type = other RNA
aaaattggacaatttcaaat

SEQ ID NO: 30 - RNA, 20 nt, synthetic construct
  source 1..20: mol_type = other RNA
aaaatttcttactggcagtt

SEQ ID NO: 31 - RNA, 20 nt, synthetic construct
  source 1..20: mol_type = other RNA
aaacaaagacccagtcccta

SEQ ID NO: 32 - RNA, 20 nt, synthetic construct
  source 1..20: mol_type = other RNA
aaacaaataattgtaaagga

SEQ ID NO: 33 - RNA, 20 nt, synthetic construct
  source 1..20: mol_type = other RNA
aaacaaatggagatgactac

SEQ ID NO: 34 - RNA, 20 nt, synthetic construct
  source 1..20: mol_type = other RNA
aaacagcctgacaagcatgt

SEQ ID NO: 35 - RNA, 20 nt, synthetic construct
  source 1..20: mol_type = other RNA
aaacatacaatcacataacc

SEQ ID NO: 36 - RNA, 20 nt, synthetic construct
  source 1..20: mol_type = other RNA
aaacatatatacatgcttgt

SEQ ID NO: 37 - RNA, 20 nt, synthetic construct
  source 1..20: mol_type = other RNA
aaacatgcaagaataattta

SEQ ID NO: 38 - RNA, 20 nt, synthetic construct
  source 1..20: mol_type = other RNA
aaacattaacctcattccaa

SEQ ID NO: 39 - RNA, 20 nt, synthetic construct
  source 1..20: mol_type = other RNA
aaacatttactccaaattat

SEQ ID NO: 40 - RNA, 20 nt, synthetic construct
  source 1..20: mol_type = other RNA
aaaccaaatagaggaagcaa

SEQ ID NO: 41 - RNA, 20 nt, synthetic construct
  source 1..20: mol_type = other RNA
aaacccatttgttaaaggat

SEQ ID NO: 42 - RNA, 20 nt, synthetic construct
  source 1..20: mol_type = other RNA
aaacctaatgaagcagaatt

SEQ ID NO: 43 - RNA, 20 nt, synthetic construct
  source 1..20: mol_type = other RNA
aaacctacacgaatgtatta

SEQ ID NO: 44 - RNA, 20 nt, synthetic construct
  source 1..20: mol_type = other RNA
aaacctcgtaacaagttact

SEQ ID NO: 45 - RNA, 20 nt, synthetic construct
  source 1..20: mol_type = other RNA
aaacggtattctttaaggtt

SEQ ID NO: 46 - RNA, 20 nt, synthetic construct
  source 1..20: mol_type = other RNA
aaacgttcagtaacttgtta

SEQ ID NO: 47 - RNA, 20 nt, synthetic construct
  source 1..20: mol_type = other RNA
aaactaaaaatcgtcagcac

SEQ ID NO: 48 - RNA, 20 nt, synthetic construct
  source 1..20: mol_type = other RNA
aaactagtactcttgttaaa

SEQ ID NO: 49 - RNA, 20 nt, synthetic construct
  source 1..20: mol_type = other RNA
aaactctaaacttgactaaa

SEQ ID NO: 50 - RNA, 20 nt, synthetic construct
  source 1..20: mol_type = other RNA
aaactgatgcttcattttgc

SEQ ID NO: 51 - RNA, 20 nt, synthetic construct
  source 1..20: mol_type = other RNA
aaactgccagtaagaaattt

SEQ ID NO: 52 - RNA, 20 nt, synthetic construct
  source 1..20: mol_type = other RNA
aaactgggaaagttgtgata

SEQ ID NO: 53 - RNA, 20 nt, synthetic construct
  source 1..20: mol_type = other RNA
aaacttgactaaatacagag

SEQ ID NO: 54 - RNA, 20 nt, synthetic construct
  source 1..20: mol_type = other RNA
aaactttaactcgatgccac

SEQ ID NO: 55 - RNA, 20 nt, synthetic construct
  source 1..20: mol_type = other RNA
aaagaataccgtttacattt

SEQ ID NO: 56 - RNA, 20 nt, synthetic construct
  source 1..20: mol_type = other RNA
aaagacagcgaacttatttt

SEQ ID NO: 57 - RNA, 20 nt, synthetic construct
  source 1..20: mol_type = other RNA
aaagacccagtccctaaatt

SEQ ID NO: 58 - RNA, 20 nt, synthetic construct
  source 1..20: mol_type = other RNA
aaagatatgtatgatctatg

SEQ ID NO: 59 - RNA, 20 nt, synthetic construct
  source 1..20: mol_type = other RNA
aaagcttgagaaatagattt

SEQ ID NO: 60 - RNA, 20 nt, synthetic construct
  source 1..20: mol_type = other RNA
aaaggaatcttgtcagatta

SEQ ID NO: 61 - RNA, 20 nt, synthetic construct
  source 1..20: mol_type = other RNA
aaaggatatagtgcccaagt

SEQ ID NO: 62 - RNA, 20 nt, synthetic construct
  source 1..20: mol_type = other RNA
aaaggcaataatttaaacat

SEQ ID NO: 63 - RNA, 20 nt, synthetic construct
  source 1..20: mol_type = other RNA
aaaggcatcatatgagctaa

SEQ ID NO: 64 - RNA, 20 nt, synthetic construct
  source 1..20: mol_type = other RNA
aaaggtaggtcaccatataa

SEQ ID NO: 65 - RNA, 20 nt, synthetic construct
  source 1..20: mol_type = other RNA
aaagtacaaaataataaagg

SEQ ID NO: 66 - RNA, 20 nt, synthetic construct
  source 1..20: mol_type = other RNA
aaagtcaatgtgacttagta

SEQ ID NO: 67 - RNA, 20 nt, synthetic construct
  source 1..20: mol_type = other RNA
aaagtcactgtctatttaag

SEQ ID NO: 68 - RNA, 20 nt, synthetic construct
  source 1..20: mol_type = other RNA
aaagttgtgatattagctca

SEQ ID NO: 69 - RNA, 20 nt, synthetic construct
  source 1..20: mol_type = other RNA
aaagtttatatttcccctaa

SEQ ID NO: 70 - RNA, 20 nt, synthetic construct
  source 1..20: mol_type = other RNA
aaataaacctcgtaacaagt

SEQ ID NO: 71 - RNA, 20 nt, synthetic construct
  source 1..20: mol_type = other RNA
aaataaattctgacaagtga

SEQ ID NO: 72 - RNA, 20 nt, synthetic construct
  source 1..20: mol_type = other RNA
aaataaggtatagtgatacc

SEQ ID NO: 73 - RNA, 20 nt, synthetic construct
  source 1..20: mol_type = other RNA
aaataagttcgctgtcttta

SEQ ID NO: 74 - RNA, 20 nt, synthetic construct
  source 1..20: mol_type = other RNA
aaataattgtaaaggaatct

SEQ ID NO: 75 - RNA, 20 nt, synthetic construct
  source 1..20: mol_type = other RNA
aaataatttggagtaaatgt

SEQ ID NO: 76 - RNA, 20 nt, synthetic construct
  source 1..20: mol_type = other RNA
aaatacagaggactggtaat

SEQ ID NO: 77 - RNA, 20 nt, synthetic construct
  source 1..20: mol_type = other RNA
aaatacataatgctaagtat

SEQ ID NO: 78 - RNA, 20 nt, synthetic construct
  source 1..20: mol_type = other RNA
aaatagacagtgactttaag

SEQ ID NO: 79 - RNA, 20 nt, synthetic construct
  source 1..20: mol_type = other RNA
aaatagaggaagcaactcat

SEQ ID NO: 80 - RNA, 20 nt, synthetic construct
  source 1..20: mol_type = other RNA
aaatataaactttaactcga

SEQ ID NO: 81 - RNA, 20 nt, synthetic construct
  source 1..20: mol_type = other RNA
aaatatgctgtgattctaat

SEQ ID NO: 82 - RNA, 20 nt, synthetic construct
  source 1..20: mol_type = other RNA
aaatatgttcattcttactg

SEQ ID NO: 83 - RNA, 20 nt, synthetic construct
  source 1..20: mol_type = other RNA
aaatatttacttaggattca

SEQ ID NO: 84 - RNA, 20 nt, synthetic construct
  source 1..20: mol_type = other RNA
aaatattttgttccagaaaa

SEQ ID NO: 85 - RNA, 20 nt, synthetic construct
  source 1..20: mol_type = other RNA
aaatcagcgttaatttcgac

SEQ ID NO: 86 - RNA, 20 nt, synthetic construct
  source 1..20: mol_type = other RNA
aaatcatatcaaacatttac

SEQ ID NO: 87 - RNA, 20 nt, synthetic construct
  source 1..20: mol_type = other RNA
aaatccctaaagattagata

SEQ ID NO: 88 - RNA, 20 nt, synthetic construct
  source 1..20: mol_type = other RNA
aaatccctaaatccctaaag

SEQ ID NO: 89 - RNA, 20 nt, synthetic construct
  source 1..20: mol_type = other RNA
aaatccttaagagaaagctt

SEQ ID NO: 90 - RNA, 20 nt, synthetic construct
  source 1..20: mol_type = other RNA
aaatcgtcagcacagagtat

SEQ ID NO: 91 - RNA, 20 nt, synthetic construct
  source 1..20: mol_type = other RNA
aaatctatttctcaagcttt

SEQ ID NO: 92 - RNA, 20 nt, synthetic construct
  source 1..20: mol_type = other RNA
aaatgaagcatcagtttaaa

SEQ ID NO: 93 - RNA, 20 nt, synthetic construct
  source 1..20: mol_type = other RNA
aaatggagatgactactaag

SEQ ID NO: 94 - RNA, 20 nt, synthetic construct
  source 1..20: mol_type = other RNA
aaatggctcctctcttcccc

SEQ ID NO: 95 - RNA, 20 nt, synthetic construct
  source 1..20: mol_type = other RNA
aaatgtaaacggtattcttt

SEQ ID NO: 96 - RNA, 20 nt, synthetic construct
  source 1..20: mol_type = other RNA
aaattaaacccatttgttaa

SEQ ID NO: 97 - RNA, 20 nt, synthetic construct
  source 1..20: mol_type = other RNA
aaattatccaatatacatgt

SEQ ID NO: 98 - RNA, 20 nt, synthetic construct
  source 1..20: mol_type = other RNA
aaattattcttgcatgttta

SEQ ID NO: 99 - RNA, 20 nt, synthetic construct
  source 1..20: mol_type = other RNA
aaattcaataaacaaagacc

SEQ ID NO: 100 - RNA, 20 nt, synthetic construct
  source 1..20: mol_type = other RNA
aaattctgacaagtgatact

SEQ ID NO: 101 - RNA, 20 nt, synthetic construct
  source 1..20: mol_type = other RNA
aaattgattcccacatcaca

SEQ ID NO: 102 - RNA, 20 nt, synthetic construct
  source 1..20: mol_type = other RNA
aaattggacaatttcaaatg

SEQ ID NO: 103 - RNA, 20 nt, synthetic construct
  source 1..20: mol_type = other RNA
aaattgtccaattttggggg

SEQ ID NO: 104 - RNA, 20 nt, synthetic construct
  source 1..20: mol_type = other RNA
aaatttctataatttaggga

SEQ ID NO: 105 - RNA, 20 nt, synthetic construct
  source 1..20: mol_type = other RNA
aaatttcttactggcagttt

SEQ ID NO: 106 - RNA, 20 nt, synthetic construct
  source 1..20: mol_type = other RNA
aaattttgtgatgtgggaat

SEQ ID NO: 107 - RNA, 20 nt, synthetic construct
  source 1..20: mol_type = other RNA
aaatttttaaactgatgctt

SEQ ID NO: 108 - RNA, 20 nt, synthetic construct
  source 1..20: mol_type = other RNA
aaattttttaccacagtatc

SEQ ID NO: 109 - RNA, 20 nt, synthetic construct
  source 1..20: mol_type = other RNA
aacaaaatatttacttagga

SEQ ID NO: 110 - RNA, 20 nt, synthetic construct
  source 1..20: mol_type = other RNA
aacaaagacccagtccctaa

SEQ ID NO: 111 - RNA, 20 nt, synthetic construct
  source 1..20: mol_type = other RNA
aacaaataaggtatagtgat

SEQ ID NO: 112 - RNA, 20 nt, synthetic construct
  source 1..20: mol_type = other RNA
aacaaataattgtaaaggaa

SEQ ID NO: 113 - RNA, 20 nt, synthetic construct
  source 1..20: mol_type = other RNA
aacaaatggagatgactact

SEQ ID NO: 114 - RNA, 20 nt, synthetic construct
  source 1..20: mol_type = other RNA
aacaaatgggtttaatttaa

SEQ ID NO: 115 - RNA, 20 nt, synthetic construct
  source 1..20: mol_type = other RNA
aacaagagtactagtttttt

SEQ ID NO: 116 - RNA, 20 nt, synthetic construct
  source 1..20: mol_type = other RNA
aacaagttactgaacgttta

SEQ ID NO: 117 - RNA, 20 nt, synthetic construct
  source 1..20: mol_type = other RNA
aacacttaatactatgaaaa

SEQ ID NO: 118 - RNA, 20 nt, synthetic construct
  source 1..20: mol_type = other RNA
aacagatccctaaatcccta

SEQ ID NO: 119 - RNA, 20 nt, synthetic construct
  source 1..20: mol_type = other RNA
aacagcctgacaagcatgta

SEQ ID NO: 120 - RNA, 20 nt, synthetic construct
  source 1..20: mol_type = other RNA
aacatacaatcacataacct

SEQ ID NO: 121 - RNA, 20 nt, synthetic construct
  source 1..20: mol_type = other RNA
aacatatatacatgcttgtc

SEQ ID NO: 122 - RNA, 20 nt, synthetic construct
  source 1..20: mol_type = other RNA
aacatatttgtggcatcgag

SEQ ID NO: 123 - RNA, 20 nt, synthetic construct
  source 1..20: mol_type = other RNA
aacatgaggtatcactatac

SEQ ID NO: 124 - RNA, 20 nt, synthetic construct
  source 1..20: mol_type = other RNA
aacatgcaagaataatttaa

SEQ ID NO: 125 - RNA, 20 nt, synthetic construct
  source 1..20: mol_type = other RNA
aacattaacctcattccaag

SEQ ID NO: 126 - RNA, 20 nt, synthetic construct
  source 1..20: mol_type = other RNA
aacatttaagaactgtacaa

SEQ ID NO: 127 - RNA, 20 nt, synthetic construct
  source 1..20: mol_type = other RNA
aacatttactccaaattatt

SEQ ID NO: 128 - RNA, 20 nt, synthetic construct
  source 1..20: mol_type = other RNA
aaccaaatagaggaagcaac

SEQ ID NO: 129 - RNA, 20 nt, synthetic construct
  source 1..20: mol_type = other RNA
aacccatttgttaaaggata

SEQ ID NO: 130 - RNA, 20 nt, synthetic construct
  source 1..20: mol_type = other RNA
aacctaatgaagcagaatta

SEQ ID NO: 131 - RNA, 20 nt, synthetic construct
  source 1..20: mol_type = other RNA
aacctacacgaatgtattag

SEQ ID NO: 132 - RNA, 20 nt, synthetic construct
  source 1..20: mol_type = other RNA
aacctcattccaagttaatg

SEQ ID NO: 133 - RNA, 20 nt, synthetic construct
  source 1..20: mol_type = other RNA
aacctcgtaacaagttactg

SEQ ID NO: 134 - RNA, 20 nt, synthetic construct
  source 1..20: mol_type = other RNA
aaccttaaagaataccgttt

SEQ ID NO: 135 - RNA, 20 nt, synthetic construct
  source 1..20: mol_type = other RNA
aacggtattctttaaggtta

SEQ ID NO: 136 - RNA, 20 nt, synthetic construct
  source 1..20: mol_type = other RNA
aacgttcagtaacttgttac

SEQ ID NO: 137 - RNA, 20 nt, synthetic construct
  source 1..20: mol_type = other RNA
aacgtttaaacagcctgaca

SEQ ID NO: 138 - RNA, 20 nt, synthetic construct
  source 1..20: mol_type = other RNA
aactaaaaatcgtcagcaca

SEQ ID NO: 139 - RNA, 20 nt, synthetic construct
  source 1..20: mol_type = other RNA
aactagtactcttgttaaaa

SEQ ID NO: 140 - RNA, 20 nt, synthetic construct
  source 1..20: mol_type = other RNA
aactcgatgccacaaatatg

SEQ ID NO: 141 - RNA, 20 nt, synthetic construct
  source 1..20: mol_type = other RNA
aactctaaacttgactaaat

SEQ ID NO: 142 - RNA, 20 nt, synthetic construct
  source 1..20: mol_type = other RNA
aactgaggcaaatttaaaag

SEQ ID NO: 143 - RNA, 20 nt, synthetic construct
  source 1..20: mol_type = other RNA
aactgatgcttcattttgct

SEQ ID NO: 144 - RNA, 20 nt, synthetic construct
  source 1..20: mol_type = other RNA
aactgccagtaagaaatttt

SEQ ID NO: 145 - RNA, 20 nt, synthetic construct
  source 1..20: mol_type = other RNA
aactgggaaagttgtgatat

SEQ ID NO: 146 - RNA, 20 nt, synthetic construct
  source 1..20: mol_type = other RNA
aactgtacaattaccagtcc

SEQ ID NO: 147 - RNA, 20 nt, synthetic construct
  source 1..20: mol_type = other RNA
aacttgactaaatacagagg

SEQ ID NO: 148 - RNA, 20 nt, synthetic construct
  source 1..20: mol_type = other RNA
aacttggaatgaggttaatg

SEQ ID NO: 149 - RNA, 20 nt, synthetic construct
  source 1..20: mol_type = other RNA
aacttgggcactatatcctt

SEQ ID NO: 150 - RNA, 20 nt, synthetic construct
  source 1..20: mol_type = other RNA
aacttgttacgaggtttatt

SEQ ID NO: 151 - RNA, 20 nt, synthetic construct
  source 1..20: mol_type = other RNA
aactttaactcgatgccaca

SEQ ID NO: 152 - RNA, 20 nt, synthetic construct
  source 1..20: mol_type = other RNA
aactttcccagtttaaaaaa

SEQ ID NO: 153 - RNA, 20 nt, synthetic construct
  source 1..20: mol_type = other RNA
aagaactgtacaattaccag

SEQ ID NO: 154 - RNA, 20 nt, synthetic construct
  source 1..20: mol_type = other RNA
aagaataccgtttacatttc

SEQ ID NO: 155 - RNA, 20 nt, synthetic construct
  source 1..20: mol_type = other RNA
aagaatgaacatatttgtgg

SEQ ID NO: 156 - RNA, 20 nt, synthetic construct
  source 1..20: mol_type = other RNA
aagaattttgattgagaaat

SEQ ID NO: 157 - RNA, 20 nt, synthetic construct
  source 1..20: mol_type = other RNA
aagacagcgaacttatttta

SEQ ID NO: 158 - RNA, 20 nt, synthetic construct
  source 1..20: mol_type = other RNA
aagacccagtccctaaatta

SEQ ID NO: 159 - RNA, 20 nt, synthetic construct
  source 1..20: mol_type = other RNA
aagagaaagcttgagaaata

SEQ ID NO: 160 - RNA, 20 nt, synthetic construct
  source 1..20: mol_type = other RNA
aagagaggagccattttggt

SEQ ID NO: 161 - RNA, 20 nt, synthetic construct
  source 1..20: mol_type = other RNA
aagagtactagttttttaaa

SEQ ID NO: 162 - RNA, 20 nt, synthetic construct
  source 1..20: mol_type = other RNA
aagatatgtatgatctatgt

SEQ ID NO: 163 - RNA, 20 nt, synthetic construct
  source 1..20: mol_type = other RNA
aagattaaacatacaatcac

SEQ ID NO: 164 - RNA, 20 nt, synthetic construct
  source 1..20: mol_type = other RNA
aagattcctttacaattatt

SEQ ID NO: 165 - RNA, 20 nt, synthetic construct
  source 1..20: mol_type = other RNA
aagcaactcatatattaaat

SEQ ID NO: 166 - RNA, 20 nt, synthetic construct
  source 1..20: mol_type = other RNA
aagcagaattaaatactgta

SEQ ID NO: 167 - RNA, 20 nt, synthetic construct
  source 1..20: mol_type = other RNA
aagcatcagtttaaaaattt

SEQ ID NO: 168 - RNA, 20 nt, synthetic construct
  source 1..20: mol_type = other RNA
aagcatgtatatatgtttaa

SEQ ID NO: 169 - RNA, 20 nt, synthetic construct
  source 1..20: mol_type = other RNA
aagctgtcgaaattaacgct

SEQ ID NO: 170 - RNA, 20 nt, synthetic construct
  source 1..20: mol_type = other RNA
aagcttgagaaatagatttt

SEQ ID NO: 171 - RNA, 20 nt, synthetic construct
  source 1..20: mol_type = other RNA
aagctttctcttaaggattt

SEQ ID NO: 172 - RNA, 20 nt, synthetic construct
  source 1..20: mol_type = other RNA
aaggaatcttgtcagattac

SEQ ID NO: 173 - RNA, 20 nt, synthetic construct
  source 1..20: mol_type = other RNA
aaggatatagtgcccaagtt

SEQ ID NO: 174 - RNA, 20 nt, synthetic construct
  source 1..20: mol_type = other RNA
aaggatttaataccagatta

SEQ ID NO: 175 - RNA, 20 nt, synthetic construct
  source 1..20: mol_type = other RNA
aaggcaataatttaaacatt

SEQ ID NO: 176 - RNA, 20 nt, synthetic construct
  source 1..20: mol_type = other RNA
aaggcatcatatgagctaat

SEQ ID NO: 177 - RNA, 20 nt, synthetic construct
  source 1..20: mol_type = other RNA
aaggtaggtcaccatataac

SEQ ID NO: 178 - RNA, 20 nt, synthetic construct
  source 1..20: mol_type = other RNA
aaggtatagtgatacctcat

SEQ ID NO: 179 - RNA, 20 nt, synthetic construct
  source 1..20: mol_type = other RNA
aaggttatgtgattgtatgt

SEQ ID NO: 180 - RNA, 20 nt, synthetic construct
  source 1..20: mol_type = other RNA
aagtaaatattttgttccag

SEQ ID NO: 181 - RNA, 20 nt, synthetic construct
  source 1..20: mol_type = other RNA
aagtacaaaataataaaggt

SEQ ID NO: 182 - RNA, 20 nt, synthetic construct
  source 1..20: mol_type = other RNA
aagtagaaataaacctcgta

SEQ ID NO: 183 - RNA, 20 nt, synthetic construct
  source 1..20: mol_type = other RNA
aagtattgacaaaggtaggt

SEQ ID NO: 184 - RNA, 20 nt, synthetic construct
  source 1..20: mol_type = other RNA
aagtcaatgtgacttagtag

SEQ ID NO: 185 - RNA, 20 nt, synthetic construct
  source 1..20: mol_type = other RNA
aagtcacattgactttaaca

SEQ ID NO: 186 - RNA, 20 nt, synthetic construct
  source 1..20: mol_type = other RNA
aagtcactgtctatttaaga

SEQ ID NO: 187 - RNA, 20 nt, synthetic construct
  source 1..20: mol_type = other RNA
aagtgatactgtggtaaaaa

SEQ ID NO: 188 - RNA, 20 nt, synthetic construct
  source 1..20: mol_type = other RNA
aagttaatgtggtctaataa

SEQ ID NO: 189 - RNA, 20 nt, synthetic construct
  source 1..20: mol_type = other RNA
aagttactgaacgtttaaac

SEQ ID NO: 190 - RNA, 20 nt, synthetic construct
  source 1..20: mol_type = other RNA
aagttatatggtgacctacc

SEQ ID NO: 191 - RNA, 20 nt, synthetic construct
  source 1..20: mol_type = other RNA
aagttatttaataagttcac

SEQ ID NO: 192 - RNA, 20 nt, synthetic construct
  source 1..20: mol_type = other RNA
aagttcacctattgattata

SEQ ID NO: 193 - RNA, 20 nt, synthetic construct
  source 1..20: mol_type = other RNA
aagttcgctgtctttaaaca

SEQ ID NO: 194 - RNA, 20 nt, synthetic construct
  source 1..20: mol_type = other RNA
aagttgtgatattagctcat

SEQ ID NO: 195 - RNA, 20 nt, synthetic construct
  source 1..20: mol_type = other RNA
aagtttagagttttaacaag

SEQ ID NO: 196 - RNA, 20 nt, synthetic construct
  source 1..20: mol_type = other RNA
aagtttatatttcccctaaa

SEQ ID NO: 197 - RNA, 20 nt, synthetic construct
  source 1..20: mol_type = other RNA
aataaacaaagacccagtcc

SEQ ID NO: 198 - RNA, 20 nt, synthetic construct
  source 1..20: mol_type = other RNA
aataaacctcgtaacaagtt

SEQ ID NO: 199 - RNA, 20 nt, synthetic construct
  source 1..20: mol_type = other RNA
aataaattctgacaagtgat

SEQ ID NO: 200 - RNA, 20 nt, synthetic construct
  source 1..20: mol_type = other RNA
aataaggtatagtgatacct

SEQ ID NO: 201 - RNA, 20 nt, synthetic construct
  source 1..20: mol_type = other RNA
aataagttcacctattgatt

SEQ ID NO: 202 - RNA, 20 nt, synthetic construct
  source 1..20: mol_type = other RNA
aataagttcgctgtctttaa

SEQ ID NO: 203 - RNA, 20 nt, synthetic construct
  source 1..20: mol_type = other RNA
aataatctataattttcagg

SEQ ID NO: 204 - RNA, 20 nt, synthetic construct
  source 1..20: mol_type = other RNA
aataatctggtattaaatcc

SEQ ID NO: 205 - RNA, 20 nt, synthetic construct
  source 1..20: mol_type = other RNA
aataattgtaaaggaatctt

SEQ ID NO: 206 - RNA, 20 nt, synthetic construct
  source 1..20: mol_type = other RNA
aataatttggagtaaatgtt

SEQ ID NO: 207 - RNA, 20 nt, synthetic construct
  source 1..20: mol_type = other RNA
aatacagaggactggtaatt

SEQ ID NO: 208 - RNA, 20 nt, synthetic construct
  source 1..20: mol_type = other RNA
aatacagtatttaattctgc

SEQ ID NO: 209 - RNA, 20 nt, synthetic construct
  source 1..20: mol_type = other RNA
aatacataatgctaagtatt

SEQ ID NO: 210 - RNA, 20 nt, synthetic construct
  source 1..20: mol_type = other RNA
aatacattcgtgtaggtttt

SEQ ID NO: 211 - RNA, 20 nt, synthetic construct
  source 1..20: mol_type = other RNA
aataccaaaatggctcctct

SEQ ID NO: 212 - RNA, 20 nt, synthetic construct
  source 1..20: mol_type = other RNA
aataccagattattagacca

SEQ ID NO: 213 - RNA, 20 nt, synthetic construct
  source 1..20: mol_type = other RNA
aataccgtttacatttctca

SEQ ID NO: 214 - RNA, 20 nt, synthetic construct
  source 1..20: mol_type = other RNA
aatactacaacatttaagaa

SEQ ID NO: 215 - RNA, 20 nt, synthetic construct
  source 1..20: mol_type = other RNA
aatacttagcattatgtatt

SEQ ID NO: 216 - RNA, 20 nt, synthetic construct
  source 1..20: mol_type = other RNA
aatagacagtgactttaaga

SEQ ID NO: 217 - RNA, 20 nt, synthetic construct
  source 1..20: mol_type = other RNA
aatagaggaagcaactcata

SEQ ID NO: 218 - RNA, 20 nt, synthetic construct
  source 1..20: mol_type = other RNA
aataggtgaacttattaaat

SEQ ID NO: 219 - RNA, 20 nt, synthetic construct
  source 1..20: mol_type = other RNA
aatataaactttaactcgat

SEQ ID NO: 220 - RNA, 20 nt, synthetic construct
  source 1..20: mol_type = other RNA
aatatatgagttgcttcctc

SEQ ID NO: 221 - RNA, 20 nt, synthetic construct
  source 1..20: mol_type = other RNA
aatatcacaactttcccagt

SEQ ID NO: 222 - RNA, 20 nt, synthetic construct
  source 1..20: mol_type = other RNA
aatatgctgtgattctaata

SEQ ID NO: 223 - RNA, 20 nt, synthetic construct
  source 1..20: mol_type = other RNA
aatatgttcattcttactgt

SEQ ID NO: 224 - RNA, 20 nt, synthetic construct
  source 1..20: mol_type = other RNA
aatatttacttaggattcac

SEQ ID NO: 225 - RNA, 20 nt, synthetic construct
  source 1..20: mol_type = other RNA
aatattttgttccagaaaag

SEQ ID NO: 226 - RNA, 20 nt, synthetic construct
  source 1..20: mol_type = other RNA
aatcaataggtgaacttatt

SEQ ID NO: 227 - RNA, 20 nt, synthetic construct
  source 1..20: mol_type = other RNA
aatcaattttagatggtcac

SEQ ID NO: 228 - RNA, 20 nt, synthetic construct
  source 1..20: mol_type = other RNA
aatcacagcatatttagggg

SEQ ID NO: 229 - RNA, 20 nt, synthetic construct
  source 1..20: mol_type = other RNA
aatcacataaccttaaagaa

SEQ ID NO: 230 - RNA, 20 nt, synthetic construct
  source 1..20: mol_type = other RNA
aatcagcgttaatttcgaca

SEQ ID NO: 231 - RNA, 20 nt, synthetic construct
  source 1..20: mol_type = other RNA
aatcatatcaaacatttact

SEQ ID NO: 232 - RNA, 20 nt, synthetic construct
  source 1..20: mol_type = other RNA
aatccctaaagattagatac

SEQ ID NO: 233 - RNA, 20 nt, synthetic construct
  source 1..20: mol_type = other RNA
aatccctaaatccctaaaga

SEQ ID NO: 234 - RNA, 20 nt, synthetic construct
  source 1..20: mol_type = other RNA
aatcctaagtaaatattttg

SEQ ID NO: 235 - RNA, 20 nt, synthetic construct
  source 1..20: mol_type = other RNA
aatccttaagagaaagcttg

SEQ ID NO: 236 - RNA, 20 nt, synthetic construct
  source 1..20: mol_type = other RNA
aatcgtcagcacagagtatg

SEQ ID NO: 237 - RNA, 20 nt, synthetic construct
  source 1..20: mol_type = other RNA
aatctagattgtgaccatct

SEQ ID NO: 238 - RNA, 20 nt, synthetic construct
  source 1..20: mol_type = other RNA
aatctataattttcaggacc

SEQ ID NO: 239 - RNA, 20 nt, synthetic construct
  source 1..20: mol_type = other RNA
aatctatttctcaagctttc

SEQ ID NO: 240 - RNA, 20 nt, synthetic construct
  source 1..20: mol_type = other RNA
aatctgacaagattccttta

SEQ ID NO: 241 - RNA, 20 nt, synthetic construct
  source 1..20: mol_type = other RNA
aatctggtattaaatcctta

SEQ ID NO: 242 - RNA, 20 nt, synthetic construct
  source 1..20: mol_type = other RNA
aatcttaaatagacagtgac

SEQ ID NO: 243 - RNA, 20 nt, synthetic construct
  source 1..20: mol_type = other RNA
aatcttgtcagattacagta

SEQ ID NO: 244 - RNA, 20 nt, synthetic construct
  source 1..20: mol_type = other RNA
aatctttagggatttaggga

SEQ ID NO: 245 - RNA, 20 nt, synthetic construct
  source 1..20: mol_type = other RNA
aatgaacatatttgtggcat

SEQ ID NO: 246 - RNA, 20 nt, synthetic construct
  source 1..20: mol_type = other RNA
aatgaagcagaattaaatac

SEQ ID NO: 247 - RNA, 20 nt, synthetic construct
  source 1..20: mol_type = other RNA
aatgaagcatcagtttaaaa

SEQ ID NO: 248 - RNA, 20 nt, synthetic construct
  source 1..20: mol_type = other RNA
aatgaattattttgcatttg

SEQ ID NO: 249 - RNA, 20 nt, synthetic construct
  source 1..20: mol_type = other RNA
aatgaggttaatgtttaaat

SEQ ID NO: 250 - RNA, 20 nt, synthetic construct
  source 1..20: mol_type = other RNA
aatgctaagtattgacaaag

SEQ ID NO: 251 - RNA, 20 nt, synthetic construct
  source 1..20: mol_type = other RNA
aatggagatgactactaagt

SEQ ID NO: 252 - RNA, 20 nt, synthetic construct
  source 1..20: mol_type = other RNA
aatggctcctctcttccccc

SEQ ID NO: 253 - RNA, 20 nt, synthetic construct
  source 1..20: mol_type = other RNA
aatgtaaacggtattcttta

SEQ ID NO: 254 - RNA, 20 nt, synthetic construct
  source 1..20: mol_type = other RNA
aatgtattagaatcacagca

SEQ ID NO: 255 - RNA, 20 nt, synthetic construct
  source 1..20: mol_type = other RNA
aatgtgacttagtagtcatc

SEQ ID NO: 256 - RNA, 20 nt, synthetic construct
  source 1..20: mol_type = other RNA
aatgtggtctaataatctgg

SEQ ID NO: 257 - RNA, 20 nt, synthetic construct
  source 1..20: mol_type = other RNA
aatgttgtagtattaatttc

SEQ ID NO: 258 - RNA, 20 nt, synthetic construct
  source 1..20: mol_type = other RNA
aatgtttaaattattgcctt

SEQ ID NO: 259 - RNA, 20 nt, synthetic construct
  source 1..20: mol_type = other RNA
aattaaacccatttgttaaa

SEQ ID NO: 260 - RNA, 20 nt, synthetic construct
  source 1..20: mol_type = other RNA
aattaccagtcctctgtatt

SEQ ID NO: 261 - RNA, 20 nt, synthetic construct
  source 1..20: mol_type = other RNA
aattatccaatatacatgtc

SEQ ID NO: 262 - RNA, 20 nt, synthetic construct
  source 1..20: mol_type = other RNA
aattattcttgcatgtttat

SEQ ID NO: 263 - RNA, 20 nt, synthetic construct
  source 1..20: mol_type = other RNA
aattattttgtagcaaaatg

SEQ ID NO: 264 - RNA, 20 nt, synthetic construct
  source 1..20: mol_type = other RNA
aattcaataaacaaagaccc

SEQ ID NO: 265 - RNA, 20 nt, synthetic construct
  source 1..20: mol_type = other RNA
aattctgacaagtgatactg

SEQ ID NO: 266 - RNA, 20 nt, synthetic construct
  source 1..20: mol_type = other RNA
aattctgcttcattaggttt

SEQ ID NO: 267 - RNA, 20 nt, synthetic construct
  source 1..20: mol_type = other RNA
aattgattcccacatcacaa

SEQ ID NO: 268 - RNA, 20 nt, synthetic construct
  source 1..20: mol_type = other RNA
aattggacaatttcaaatgc

SEQ ID NO: 269 - RNA, 20 nt, synthetic construct
  source 1..20: mol_type = other RNA
aattgtaaaggaatcttgtc

SEQ ID NO: 270 - RNA, 20 nt, synthetic construct
  source 1..20: mol_type = other RNA
aattgtacagttcttaaatg

SEQ ID NO: 271 - RNA, 20 nt, synthetic construct
  source 1..20: mol_type = other RNA
aattgtccaattttggggga

SEQ ID NO: 272 - RNA, 20 nt, synthetic construct
  source 1..20: mol_type = other RNA
aatttaaaatttcttactgg

SEQ ID NO: 273 - RNA, 20 nt, synthetic construct
  source 1..20: mol_type = other RNA
aatttaaacattaacctcat

SEQ ID NO: 274 - RNA, 20 nt, synthetic construct
  source 1..20: mol_type = other RNA
aatttagggactgggtcttt

SEQ ID NO: 275 - RNA, 20 nt, synthetic construct
  source 1..20: mol_type = other RNA
aatttcaaaactaaaaatcg

SEQ ID NO: 276 - RNA, 20 nt, synthetic construct
  source 1..20: mol_type = other RNA
aatttcgacagcttagtctg

SEQ ID NO: 277 - RNA, 20 nt, synthetic construct
  source 1..20: mol_type = other RNA
aatttctataatttagggac

SEQ ID NO: 278 - RNA, 20 nt, synthetic construct
  source 1..20: mol_type = other RNA
aatttcttactggcagtttt

SEQ ID NO: 279 - RNA, 20 nt, synthetic construct
  source 1..20: mol_type = other RNA
aatttgaaatacataatgct

SEQ ID NO: 280 - RNA, 20 nt, synthetic construct
  source 1..20: mol_type = other RNA
aatttggagtaaatgtttga

SEQ ID NO: 281 - RNA, 20 nt, synthetic construct
  source 1..20: mol_type = other RNA
aatttgtatctaatctttag

SEQ ID NO: 282 - RNA, 20 nt, synthetic construct
  source 1..20: mol_type = other RNA
aattttagatggtcacaatc

SEQ ID NO: 283 - RNA, 20 nt, synthetic construct
  source 1..20: mol_type = other RNA
aattttcaggaccacagact

SEQ ID NO: 284 - RNA, 20 nt, synthetic construct
  source 1..20: mol_type = other RNA
aattttgattgagaaatgta

SEQ ID NO: 285 - RNA, 20 nt, synthetic construct
  source 1..20: mol_type = other RNA
aattttgggggaagagagga

SEQ ID NO: 286 - RNA, 20 nt, synthetic construct
  source 1..20: mol_type = other RNA
aattttgtgatgtgggaatc

SEQ ID NO: 287 - RNA, 20 nt, synthetic construct
  source 1..20: mol_type = other RNA
aatttttaaactgatgcttc

SEQ ID NO: 288 - RNA, 20 nt, synthetic construct
  source 1..20: mol_type = other RNA
aattttttaccacagtatca

SEQ ID NO: 289 - RNA, 20 nt, synthetic construct
  source 1..20: mol_type = other RNA
acaaaataatttggagtaaa

SEQ ID NO: 290 - RNA, 20 nt, synthetic construct
  source 1..20: mol_type = other RNA
acaaaatatttacttaggat

SEQ ID NO: 291 - RNA, 20 nt, synthetic construct
  source 1..20: mol_type = other RNA
acaaagacccagtccctaaa

SEQ ID NO: 292 - RNA, 20 nt, synthetic construct
  source 1..20: mol_type = other RNA
acaaaggtaggtcaccatat

SEQ ID NO: 293 - RNA, 20 nt, synthetic construct
  source 1..20: mol_type = other RNA
acaaataaggtatagtgata

SEQ ID NO: 294 - RNA, 20 nt, synthetic construct
  source 1..20: mol_type = other RNA
acaaataattgtaaaggaat

SEQ ID NO: 295 - RNA, 20 nt, synthetic construct
  source 1..20: mol_type = other RNA
acaaatatgttcattcttac

SEQ ID NO: 296 - RNA, 20 nt, synthetic construct
  source 1..20: mol_type = other RNA
acaaatggagatgactacta

SEQ ID NO: 297 - RNA, 20 nt, synthetic construct
  source 1..20: mol_type = other RNA
acaaatgggtttaatttaaa

SEQ ID NO: 298 - RNA, 20 nt, synthetic construct
  source 1..20: mol_type = other RNA
acaaatttttaaactgatgc

SEQ ID NO: 299 - RNA, 20 nt, synthetic construct
  source 1..20: mol_type = other RNA
acaaattttttaccacagta

SEQ ID NO: 300 - RNA, 20 nt, synthetic construct
  source 1..20: mol_type = other RNA
acaacagatccctaaatccc

SEQ ID NO: 301 - RNA, 20 nt, synthetic construct
  source 1..20: mol_type = other RNA
acaacatttaagaactgtac

SEQ ID NO: 302 - RNA, 20 nt, synthetic construct
  source 1..20: mol_type = other RNA
acaactttcccagtttaaaa

SEQ ID NO: 303 - RNA, 20 nt, synthetic construct
  source 1..20: mol_type = other RNA
acaagagtactagtttttta

SEQ ID NO: 304 - RNA, 20 nt, synthetic construct
  source 1..20: mol_type = other RNA
acaagattcctttacaatta

SEQ ID NO: 305 - RNA, 20 nt, synthetic construct
  source 1..20: mol_type = other RNA
acaagcatgtatatatgttt

SEQ ID NO: 306 - RNA, 20 nt, synthetic construct
  source 1..20: mol_type = other RNA
acaagtgatactgtggtaaa

SEQ ID NO: 307 - RNA, 20 nt, synthetic construct
  source 1..20: mol_type = other RNA
acaagttactgaacgtttaa

SEQ ID NO: 308 - RNA, 20 nt, synthetic construct
  source 1..20: mol_type = other RNA
acaatcacataaccttaaag

SEQ ID NO: 309 - RNA, 20 nt, synthetic construct
  source 1..20: mol_type = other RNA
acaatctagattataatcaa

SEQ ID NO: 310 - RNA, 20 nt, synthetic construct
  source 1..20: mol_type = other RNA
acaattaccagtcctctgta

SEQ ID NO: 311 - RNA, 20 nt, synthetic construct
  source 1..20: mol_type = other RNA
acaattatttgttttcatag

SEQ ID NO: 312 - RNA, 20 nt, synthetic construct
  source 1..20: mol_type = other RNA
acaatttcaaatgcaaaata

SEQ ID NO: 313 - RNA, 20 nt, synthetic construct
  source 1..20: mol_type = other RNA
acacatactctgtgctgacg

SEQ ID NO: 314 - RNA, 20 nt, synthetic construct
  source 1..20: mol_type = other RNA
acacgaatgtattagaatca

SEQ ID NO: 315 - RNA, 20 nt, synthetic construct
  source 1..20: mol_type = other RNA
acacttaatactatgaaaac

SEQ ID NO: 316 - RNA, 20 nt, synthetic construct
  source 1..20: mol_type = other RNA
acagactaagctgtcgaaat

SEQ ID NO: 317 - RNA, 20 nt, synthetic construct
  source 1..20: mol_type = other RNA
acagaggactggtaattgta

SEQ ID NO: 318 - RNA, 20 nt, synthetic construct
  source 1..20: mol_type = other RNA
acagagtatgtgtaaaaatc

SEQ ID NO: 319 - RNA, 20 nt, synthetic construct
  source 1..20: mol_type = other RNA
acagatccctaaatccctaa

SEQ ID NO: 320 - RNA, 20 nt, synthetic construct
  source 1..20: mol_type = other RNA
acagatttttacacatactc

SEQ ID NO: 321 - RNA, 20 nt, synthetic construct
  source 1..20: mol_type = other RNA
acagcatatttaggggaaat

SEQ ID NO: 322 - RNA, 20 nt, synthetic construct
  source 1..20: mol_type = other RNA
acagcctgacaagcatgtat

SEQ ID NO: 323 - RNA, 20 nt, synthetic construct
  source 1..20: mol_type = other RNA
acagcgaacttattttaata

SEQ ID NO: 324 - RNA, 20 nt, synthetic construct
  source 1..20: mol_type = other RNA
acagcttagtctgtggtcct

SEQ ID NO: 325 - RNA, 20 nt, synthetic construct
  source 1..20: mol_type = other RNA
acagtaagaatgaacatatt

SEQ ID NO: 326 - RNA, 20 nt, synthetic construct
  source 1..20: mol_type = other RNA
acagtatcacttgtcagaat

SEQ ID NO: 327 - RNA, 20 nt, synthetic construct
  source 1..20: mol_type = other RNA
acagtatttaattctgcttc

SEQ ID NO: 328 - RNA, 20 nt, synthetic construct
  source 1..20: mol_type = other RNA
acagtgactttaagataaaa

SEQ ID NO: 329 - RNA, 20 nt, synthetic construct
  source 1..20: mol_type = other RNA
acagttcttaaatgttgtag

SEQ ID NO: 330 - RNA, 20 nt, synthetic construct
  source 1..20: mol_type = other RNA
acataaccttaaagaatacc

SEQ ID NO: 331 - RNA, 20 nt, synthetic construct
  source 1..20: mol_type = other RNA
acataatgctaagtattgac

SEQ ID NO: 332 - RNA, 20 nt, synthetic construct
  source 1..20: mol_type = other RNA
acatacaatcacataacctt

SEQ ID NO: 333 - RNA, 20 nt, synthetic construct
  source 1..20: mol_type = other RNA
acatactctgtgctgacgat

SEQ ID NO: 334 - RNA, 20 nt, synthetic construct
  source 1..20: mol_type = other RNA
acatagatcatacatatctt

SEQ ID NO: 335 - RNA, 20 nt, synthetic construct
  source 1..20: mol_type = other RNA
acatatatacatgcttgtca

SEQ ID NO: 336 - RNA, 20 nt, synthetic construct
  source 1..20: mol_type = other RNA
acatatcttttatatatgtg

SEQ ID NO: 337 - RNA, 20 nt, synthetic construct
  source 1..20: mol_type = other RNA
acatatttgtggcatcgagt

SEQ ID NO: 338 - RNA, 20 nt, synthetic construct
  source 1..20: mol_type = other RNA
acatcacaaaatttaaaaca

SEQ ID NO: 339 - RNA, 20 nt, synthetic construct
  source 1..20: mol_type = other RNA
acatcacaacagatccctaa

SEQ ID NO: 340 - RNA, 20 nt, synthetic construct
  source 1..20: mol_type = other RNA
acatgaggtatcactatacc

SEQ ID NO: 341 - RNA, 20 nt, synthetic construct
  source 1..20: mol_type = other RNA
acatgcaagaataatttaaa

SEQ ID NO: 342 - RNA, 20 nt, synthetic construct
  source 1..20: mol_type = other RNA
acatgcttgtcaggctgttt

SEQ ID NO: 343 - RNA, 20 nt, synthetic construct
  source 1..20: mol_type = other RNA
acatgtatattggataattt

SEQ ID NO: 344 - RNA, 20 nt, synthetic construct
  source 1..20: mol_type = other RNA
acattaacctcattccaagt

SEQ ID NO: 345 - RNA, 20 nt, synthetic construct
  source 1..20: mol_type = other RNA
acattaacttggaatgaggt

SEQ ID NO: 346 - RNA, 20 nt, synthetic construct
  source 1..20: mol_type = other RNA
acattcgtgtaggttttcaa

SEQ ID NO: 347 - RNA, 20 nt, synthetic construct
  source 1..20: mol_type = other RNA
acattgactttaacatgagg

SEQ ID NO: 348 - RNA, 20 nt, synthetic construct
  source 1..20: mol_type = other RNA
acatttaagaactgtacaat

SEQ ID NO: 349 - RNA, 20 nt, synthetic construct
  source 1..20: mol_type = other RNA
acatttactccaaattattt

SEQ ID NO: 350 - RNA, 20 nt, synthetic construct
  source 1..20: mol_type = other RNA
acatttctcaatcaaaattc

SEQ ID NO: 351 - RNA, 20 nt, synthetic construct
  source 1..20: mol_type = other RNA
accaaaatggctcctctctt

SEQ ID NO: 352 - RNA, 20 nt, synthetic construct
  source 1..20: mol_type = other RNA
accaaatagaggaagcaact

SEQ ID NO: 353 - RNA, 20 nt, synthetic construct
  source 1..20: mol_type = other RNA
accacagactaagctgtcga

SEQ ID NO: 354 - RNA, 20 nt, synthetic construct
  source 1..20: mol_type = other RNA
accacagtatcacttgtcag

SEQ ID NO: 355 - RNA, 20 nt, synthetic construct
  source 1..20: mol_type = other RNA
accacattaacttggaatga

SEQ ID NO: 356 - RNA, 20 nt, synthetic construct
  source 1..20: mol_type = other RNA
accagattattagaccacat

SEQ ID NO: 357 - RNA, 20 nt, synthetic construct
  source 1..20: mol_type = other RNA
accagtcctctgtatttagt

SEQ ID NO: 358 - RNA, 20 nt, synthetic construct
  source 1..20: mol_type = other RNA
accatataacttgggcacta

SEQ ID NO: 359 - RNA, 20 nt, synthetic construct
  source 1..20: mol_type = other RNA
accatctaaaattgattccc

SEQ ID NO: 360 - RNA, 20 nt, synthetic construct
  source 1..20: mol_type = other RNA
acccagtccctaaattatag

SEQ ID NO: 361 - RNA, 20 nt, synthetic construct
  source 1..20: mol_type = other RNA
acccatttgttaaaggatat

SEQ ID NO: 362 - RNA, 20 nt, synthetic construct
  source 1..20: mol_type = other RNA
accgtttacatttctcaatc

SEQ ID NO: 363 - RNA, 20 nt, synthetic construct
  source 1..20: mol_type = other RNA
acctaatgaagcagaattaa

SEQ ID NO: 364 - RNA, 20 nt, synthetic construct
  source 1..20: mol_type = other RNA
acctacacgaatgtattaga

SEQ ID NO: 365 - RNA, 20 nt, synthetic construct
  source 1..20: mol_type = other RNA
acctacctttgtcaatactt

SEQ ID NO: 366 - RNA, 20 nt, synthetic construct
  source 1..20: mol_type = other RNA
acctattgattataatctag

SEQ ID NO: 367 - RNA, 20 nt, synthetic construct
  source 1..20: mol_type = other RNA
acctcatgttaaagtcaatg

SEQ ID NO: 368 - RNA, 20 nt, synthetic construct
  source 1..20: mol_type = other RNA
acctcattccaagttaatgt

SEQ ID NO: 369 - RNA, 20 nt, synthetic construct
  source 1..20: mol_type = other RNA
acctcgtaacaagttactga

SEQ ID NO: 370 - RNA, 20 nt, synthetic construct
  source 1..20: mol_type = other RNA
accttaaagaataccgttta

SEQ ID NO: 371 - RNA, 20 nt, synthetic construct
  source 1..20: mol_type = other RNA
acctttattattttgtactt

SEQ ID NO: 372 - RNA, 20 nt, synthetic construct
  source 1..20: mol_type = other RNA
acctttgtcaatacttagca

SEQ ID NO: 373 - RNA, 20 nt, synthetic construct
  source 1..20: mol_type = other RNA
acgaatgtattagaatcaca

SEQ ID NO: 374 - RNA, 20 nt, synthetic construct
  source 1..20: mol_type = other RNA
acgaggtttatttctacttg

SEQ ID NO: 375 - RNA, 20 nt, synthetic construct
  source 1..20: mol_type = other RNA
acgatttttagttttgaaat

SEQ ID NO: 376 - RNA, 20 nt, synthetic construct
  source 1..20: mol_type = other RNA
acggtattctttaaggttat

SEQ ID NO: 377 - RNA, 20 nt, synthetic construct
  source 1..20: mol_type = other RNA
acgttcagtaacttgttacg

SEQ ID NO: 378 - RNA, 20 nt, synthetic construct
  source 1..20: mol_type = other RNA
acgtttaaacagcctgacaa

SEQ ID NO: 379 - RNA, 20 nt, synthetic construct
  source 1..20: mol_type = other RNA
actaaaaatcgtcagcacag

SEQ ID NO: 380 - RNA, 20 nt, synthetic construct
  source 1..20: mol_type = other RNA
actaaatacagaggactggt

SEQ ID NO: 381 - RNA, 20 nt, synthetic construct
  source 1..20: mol_type = other RNA
actaagctgtcgaaattaac

SEQ ID NO: 382 - RNA, 20 nt, synthetic construct
  source 1..20: mol_type = other RNA
actaagtcacattgacttta

SEQ ID NO: 383 - RNA, 20 nt, synthetic construct
  source 1..20: mol_type = other RNA
actacaacatttaagaactg

SEQ ID NO: 384 - RNA, 20 nt, synthetic construct
  source 1..20: mol_type = other RNA
actactaagtcacattgact

SEQ ID NO: 385 - RNA, 20 nt, synthetic construct
  source 1..20: mol_type = other RNA
actagtactcttgttaaaac

SEQ ID NO: 386 - RNA, 20 nt, synthetic construct
  source 1..20: mol_type = other RNA
actagttttttaaactggga

SEQ ID NO: 387 - RNA, 20 nt, synthetic construct
  source 1..20: mol_type = other RNA
actataccttatttgttaaa

SEQ ID NO: 388 - RNA, 20 nt, synthetic construct
  source 1..20: mol_type = other RNA
actatatcctttaacaaatg

SEQ ID NO: 389 - RNA, 20 nt, synthetic construct
  source 1..20: mol_type = other RNA
actatgaaaacaaataattg

SEQ ID NO: 390 - RNA, 20 nt, synthetic construct
  source 1..20: mol_type = other RNA
actccaaattattttgtagc

SEQ ID NO: 391 - RNA, 20 nt, synthetic construct
  source 1..20: mol_type = other RNA
actcgatgccacaaatatgt

SEQ ID NO: 392 - RNA, 20 nt, synthetic construct
  source 1..20: mol_type = other RNA
actctaaacttgactaaata

SEQ ID NO: 393 - RNA, 20 nt, synthetic construct
  source 1..20: mol_type = other RNA
actctgtgctgacgattttt

SEQ ID NO: 394 - RNA, 20 nt, synthetic construct
  source 1..20: mol_type = other RNA
actcttgttaaaactctaaa

SEQ ID NO: 395 - RNA, 20 nt, synthetic construct
  source 1..20: mol_type = other RNA
actgaacgtttaaacagcct

SEQ ID NO: 396 - RNA, 20 nt, synthetic construct
  source 1..20: mol_type = other RNA
actgaggcaaatttaaaagg

SEQ ID NO: 397 - RNA, 20 nt, synthetic construct
  source 1..20: mol_type = other RNA
actgatgcttcattttgcta

SEQ ID NO: 398 - RNA, 20 nt, synthetic construct
  source 1..20: mol_type = other RNA
actgccagtaagaaatttta

SEQ ID NO: 399 - RNA, 20 nt, synthetic construct
  source 1..20: mol_type = other RNA
actggcagttttaaaaaatc

SEQ ID NO: 400 - RNA, 20 nt, synthetic construct
  source 1..20: mol_type = other RNA
actgggaaagttgtgatatt

SEQ ID NO: 401 - RNA, 20 nt, synthetic construct
  source 1..20: mol_type = other RNA
actgggtctttgtttattga

SEQ ID NO: 402 - RNA, 20 nt, synthetic construct
  source 1..20: mol_type = other RNA
actggtaattgtacagttct

SEQ ID NO: 403 - RNA, 20 nt, synthetic construct
  source 1..20: mol_type = other RNA
actgtaatctgacaagattc

SEQ ID NO: 404 - RNA, 20 nt, synthetic construct
  source 1..20: mol_type = other RNA
actgtacaattaccagtcct

SEQ ID NO: 405 - RNA, 20 nt, synthetic construct
  source 1..20: mol_type = other RNA
actgtattaaaataagttcg

SEQ ID NO: 406 - RNA, 20 nt, synthetic construct
  source 1..20: mol_type = other RNA
actgtctatttaagattaaa

SEQ ID NO: 407 - RNA, 20 nt, synthetic construct
  source 1..20: mol_type = other RNA
actgtggtaaaaaatttgta

SEQ ID NO: 408 - RNA, 20 nt, synthetic construct
  source 1..20: mol_type = other RNA
acttaatactatgaaaacaa

SEQ ID NO: 409 - RNA, 20 nt, synthetic construct
  source 1..20: mol_type = other RNA
acttagcattatgtatttca

SEQ ID NO: 410 - RNA, 20 nt, synthetic construct
  source 1..20: mol_type = other RNA
acttaggattcacatagatc

SEQ ID NO: 411 - RNA, 20 nt, synthetic construct
  source 1..20: mol_type = other RNA
acttagtagtcatctccatt

SEQ ID NO: 412 - RNA, 20 nt, synthetic construct
  source 1..20: mol_type = other RNA
acttgaaaacctacacgaat

SEQ ID NO: 413 - RNA, 20 nt, synthetic construct
  source 1..20: mol_type = other RNA
acttgactaaatacagagga

SEQ ID NO: 414 - RNA, 20 nt, synthetic construct
  source 1..20: mol_type = other RNA
acttggaatgaggttaatgt

SEQ ID NO: 415 - RNA, 20 nt, synthetic construct
  source 1..20: mol_type = other RNA
acttgggcactatatccttt

SEQ ID NO: 416 - RNA, 20 nt, synthetic construct
  source 1..20: mol_type = other RNA
acttgtcagaatttattttt

SEQ ID NO: 417 - RNA, 20 nt, synthetic construct
  source 1..20: mol_type = other RNA
acttgttacgaggtttattt

SEQ ID NO: 418 - RNA, 20 nt, synthetic construct
  source 1..20: mol_type = other RNA
actttaacatgaggtatcac

SEQ ID NO: 419 - RNA, 20 nt, synthetic construct
  source 1..20: mol_type = other RNA
actttaactcgatgccacaa

SEQ ID NO: 420 - RNA, 20 nt, synthetic construct
  source 1..20: mol_type = other RNA
actttcccagtttaaaaaac

SEQ ID NO: 421 - RNA, 20 nt, synthetic construct
  source 1..20: mol_type = other RNA
acttttattttaaaaggcat

SEQ ID NO: 422 - RNA, 20 nt, synthetic construct
  source 1..20: mol_type = other RNA
acttttctggaacaaaatat

SEQ ID NO: 423 - RNA, 20 nt, synthetic construct
  source 1..20: mol_type = other RNA
agaaagcttgagaaatagat

SEQ ID NO: 424 - RNA, 20 nt, synthetic construct
  source 1..20: mol_type = other RNA
agaaataaacctcgtaacaa

SEQ ID NO: 425 - RNA, 20 nt, synthetic construct
  source 1..20: mol_type = other RNA
agaaatgtaaacggtattct

SEQ ID NO: 426 - RNA, 20 nt, synthetic construct
  source 1..20: mol_type = other RNA
agaaattttaaattaaaccc

SEQ ID NO: 427 - RNA, 20 nt, synthetic construct
  source 1..20: mol_type = other RNA
agaactgtacaattaccagt

SEQ ID NO: 428 - RNA, 20 nt, synthetic construct
  source 1..20: mol_type = other RNA
agaataccaaaatggctcct

SEQ ID NO: 429 - RNA, 20 nt, synthetic construct
  source 1..20: mol_type = other RNA
agaataccgtttacatttct

SEQ ID NO: 430 - RNA, 20 nt, synthetic construct
  source 1..20: mol_type = other RNA
agaatcacagcatatttagg

SEQ ID NO: 431 - RNA, 20 nt, synthetic construct
  source 1..20: mol_type = other RNA
agaatgaacatatttgtggc

SEQ ID NO: 432 - RNA, 20 nt, synthetic construct
  source 1..20: mol_type = other RNA
agaattttgattgagaaatg

SEQ ID NO: 433 - RNA, 20 nt, synthetic construct
  source 1..20: mol_type = other RNA
agacagcgaacttattttaa

SEQ ID NO: 434 - RNA, 20 nt, synthetic construct
  source 1..20: mol_type = other RNA
agacagtgactttaagataa

SEQ ID NO: 435 - RNA, 20 nt, synthetic construct
  source 1..20: mol_type = other RNA
agaccacattaacttggaat

SEQ ID NO: 436 - RNA, 20 nt, synthetic construct
  source 1..20: mol_type = other RNA
agacccagtccctaaattat

SEQ ID NO: 437 - RNA, 20 nt, synthetic construct
  source 1..20: mol_type = other RNA
agactaagctgtcgaaatta

SEQ ID NO: 438 - RNA, 20 nt, synthetic construct
  source 1..20: mol_type = other RNA
agacttttattttaaaaggc

SEQ ID NO: 439 - RNA, 20 nt, synthetic construct
  source 1..20: mol_type = other RNA
agagaaagcttgagaaatag

SEQ ID NO: 440 - RNA, 20 nt, synthetic construct
  source 1..20: mol_type = other RNA
agagacttttattttaaaag

SEQ ID NO: 441 - RNA, 20 nt, synthetic construct
  source 1..20: mol_type = other RNA
agagaggagccattttggta

SEQ ID NO: 442 - RNA, 20 nt, synthetic construct
  source 1..20: mol_type = other RNA
agaggaagcaactcatatat

SEQ ID NO: 443 - RNA, 20 nt, synthetic construct
  source 1..20: mol_type = other RNA
agaggactggtaattgtaca

SEQ ID NO: 444 - RNA, 20 nt, synthetic construct
  source 1..20: mol_type = other RNA
agaggagccattttggtatt

SEQ ID NO: 445 - RNA, 20 nt, synthetic construct
  source 1..20: mol_type = other RNA
agagtactagttttttaaac

SEQ ID NO: 446 - RNA, 20 nt, synthetic construct
  source 1..20: mol_type = other RNA
agagtatgtgtaaaaatctg

SEQ ID NO: 447 - RNA, 20 nt, synthetic construct
  source 1..20: mol_type = other RNA
agagttttaacaagagtact

SEQ ID NO: 448 - RNA, 20 nt, synthetic construct
  source 1..20: mol_type = other RNA
agatacaaattttttaccac

SEQ ID NO: 449 - RNA, 20 nt, synthetic construct
  source 1..20: mol_type = other RNA
agatatgtatgatctatgtg

SEQ ID NO: 450 - RNA, 20 nt, synthetic construct
  source 1..20: mol_type = other RNA
agatcatacatatcttttat

SEQ ID NO: 451 - RNA, 20 nt, synthetic construct
  source 1..20: mol_type = other RNA
agatccctaaatccctaaat

SEQ ID NO: 452 - RNA, 20 nt, synthetic construct
  source 1..20: mol_type = other RNA
agatgactactaagtcacat

SEQ ID NO: 453 - RNA, 20 nt, synthetic construct
  source 1..20: mol_type = other RNA
agatggtcacaatctagatt

SEQ ID NO: 454 - RNA, 20 nt, synthetic construct
  source 1..20: mol_type = other RNA
agattaaacatacaatcaca

SEQ ID NO: 455 - RNA, 20 nt, synthetic construct
  source 1..20: mol_type = other RNA
agattacagtaagaatgaac

SEQ ID NO: 456 - RNA, 20 nt, synthetic construct
  source 1..20: mol_type = other RNA
agattataatcaataggtga

SEQ ID NO: 457 - RNA, 20 nt, synthetic construct
  source 1..20: mol_type = other RNA
agattattagaccacattaa

SEQ ID NO: 458 - RNA, 20 nt, synthetic construct
  source 1..20: mol_type = other RNA
agattcctttacaattattt

SEQ ID NO: 459 - RNA, 20 nt, synthetic construct
  source 1..20: mol_type = other RNA
agattgtgaccatctaaaat

SEQ ID NO: 460 - RNA, 20 nt, synthetic construct
  source 1..20: mol_type = other RNA
agatttttacacatactctg

SEQ ID NO: 461 - RNA, 20 nt, synthetic construct
  source 1..20: mol_type = other RNA
agcaaaatgaagcatcagtt

SEQ ID NO: 462 - RNA, 20 nt, synthetic construct
  source 1..20: mol_type = other RNA
agcaactcatatattaaata

SEQ ID NO: 463 - RNA, 20 nt, synthetic construct
  source 1..20: mol_type = other RNA
agcacagagtatgtgtaaaa

SEQ ID NO: 464 - RNA, 20 nt, synthetic construct
  source 1..20: mol_type = other RNA
agcagaattaaatactgtat

SEQ ID NO: 465 - RNA, 20 nt, synthetic construct
  source 1..20: mol_type = other RNA
agcatatttaggggaaatat

SEQ ID NO: 466 - RNA, 20 nt, synthetic construct
  source 1..20: mol_type = other RNA
agcatcagtttaaaaatttg

SEQ ID NO: 467 - RNA, 20 nt, synthetic construct
  source 1..20: mol_type = other RNA
agcatgtatatatgtttaaa

SEQ ID NO: 468 - RNA, 20 nt, synthetic construct
  source 1..20: mol_type = other RNA
agcattatgtatttcaaatt

SEQ ID NO: 469 - RNA, 20 nt, synthetic construct
  source 1..20: mol_type = other RNA
agccattttggtattctggc

SEQ ID NO: 470 - RNA, 20 nt, synthetic construct
  source 1..20: mol_type = other RNA
agcctgacaagcatgtatat

SEQ ID NO: 471 - RNA, 20 nt, synthetic construct
  source 1..20: mol_type = other RNA
agcgaacttattttaataca

SEQ ID NO: 472 - RNA, 20 nt, synthetic construct
  source 1..20: mol_type = other RNA
agcgttaatttcgacagctt

SEQ ID NO: 473 - RNA, 20 nt, synthetic construct
  source 1..20: mol_type = other RNA
agctaatatcacaactttcc

SEQ ID NO: 474 - RNA, 20 nt, synthetic construct
  source 1..20: mol_type = other RNA
agctcatatgatgcctttta

SEQ ID NO: 475 - RNA, 20 nt, synthetic construct
  source 1..20: mol_type = other RNA
agctgtcgaaattaacgctg

SEQ ID NO: 476 - RNA, 20 nt, synthetic construct
  source 1..20: mol_type = other RNA
agcttagtctgtggtcctga

SEQ ID NO: 477 - RNA, 20 nt, synthetic construct
  source 1..20: mol_type = other RNA
agcttgagaaatagattttt

SEQ ID NO: 478 - RNA, 20 nt, synthetic construct
  source 1..20: mol_type = other RNA
agctttctcttaaggattta

SEQ ID NO: 479 - RNA, 20 nt, synthetic construct
  source 1..20: mol_type = other RNA
aggaagcaactcatatatta

SEQ ID NO: 480 - RNA, 20 nt, synthetic construct
  source 1..20: mol_type = other RNA
aggaatcttgtcagattaca

SEQ ID NO: 481 - RNA, 20 nt, synthetic construct
  source 1..20: mol_type = other RNA
aggaccacagactaagctgt

SEQ ID NO: 482 - RNA, 20 nt, synthetic construct
  source 1..20: mol_type = other RNA
aggactggtaattgtacagt

SEQ ID NO: 483 - RNA, 20 nt, synthetic construct
  source 1..20: mol_type = other RNA
aggagccattttggtattct

SEQ ID NO: 484 - RNA, 20 nt, synthetic construct
  source 1..20: mol_type = other RNA
aggatatagtgcccaagtta

SEQ ID NO: 485 - RNA, 20 nt, synthetic construct
  source 1..20: mol_type = other RNA
aggattcacatagatcatac

SEQ ID NO: 486 - RNA, 20 nt, synthetic construct
  source 1..20: mol_type = other RNA
aggatttaataccagattat

SEQ ID NO: 487 - RNA, 20 nt, synthetic construct
  source 1..20: mol_type = other RNA
aggcaaatttaaaaggcaat

SEQ ID NO: 488 - RNA, 20 nt, synthetic construct
  source 1..20: mol_type = other RNA
aggcaataatttaaacatta

SEQ ID NO: 489 - RNA, 20 nt, synthetic construct
  source 1..20: mol_type = other RNA
aggcatcatatgagctaata

SEQ ID NO: 490 - RNA, 20 nt, synthetic construct
  source 1..20: mol_type = other RNA
aggctgtttaaacgttcagt

SEQ ID NO: 491 - RNA, 20 nt, synthetic construct
  source 1..20: mol_type = other RNA
agggactgggtctttgttta

SEQ ID NO: 492 - RNA, 20 nt, synthetic construct
  source 1..20: mol_type = other RNA
agggatctgttgtgatgtcg

SEQ ID NO: 493 - RNA, 20 nt, synthetic construct
  source 1..20: mol_type = other RNA
agggatttagggatctgttg

SEQ ID NO: 494 - RNA, 20 nt, synthetic construct
  source 1..20: mol_type = other RNA
agggatttagggatttaggg

SEQ ID NO: 495 - RNA, 20 nt, synthetic construct
  source 1..20: mol_type = other RNA
agggccagaataccaaaatg

SEQ ID NO: 496 - RNA, 20 nt, synthetic construct
  source 1..20: mol_type = other RNA
aggggaaatataaactttaa

SEQ ID NO: 497 - RNA, 20 nt, synthetic construct
  source 1..20: mol_type = other RNA
aggtaggtcaccatataact

SEQ ID NO: 498 - RNA, 20 nt, synthetic construct
  source 1..20: mol_type = other RNA
aggtatagtgatacctcatg

SEQ ID NO: 499 - RNA, 20 nt, synthetic construct
  source 1..20: mol_type = other RNA
aggtatcactataccttatt

SEQ ID NO: 500 - RNA, 20 nt, synthetic construct
  source 1..20: mol_type = other RNA
aggtcaccatataacttggg

SEQ ID NO: 501 - RNA, 20 nt, synthetic construct
  source 1..20: mol_type = other RNA
aggtgaacttattaaataac

SEQ ID NO: 502 - RNA, 20 nt, synthetic construct
  source 1..20: mol_type = other RNA
aggttatgtgattgtatgtt

SEQ ID NO: 503 - RNA, 20 nt, synthetic construct
  source 1..20: mol_type = other RNA
aggtttatttctacttgaaa

SEQ ID NO: 504 - RNA, 20 nt, synthetic construct
  source 1..20: mol_type = other RNA
aggtttcataaataaatcat

SEQ ID NO: 505 - RNA, 20 nt, synthetic construct
  source 1..20: mol_type = other RNA
aggttttcaagtagaaataa

SEQ ID NO: 506 - RNA, 20 nt, synthetic construct
  source 1..20: mol_type = other RNA
agtaaatattttgttccaga

SEQ ID NO: 507 - RNA, 20 nt, synthetic construct
  source 1..20: mol_type = other RNA
agtaaatgtttgatatgatt

SEQ ID NO: 508 - RNA, 20 nt, synthetic construct
  source 1..20: mol_type = other RNA
agtaacttgttacgaggttt

SEQ ID NO: 509 - RNA, 20 nt, synthetic construct
  source 1..20: mol_type = other RNA
agtaagaatgaacatatttg

SEQ ID NO: 510 - RNA, 20 nt, synthetic construct
  source 1..20: mol_type = other RNA
agtacaaaataataaaggta

SEQ ID NO: 511 - RNA, 20 nt, synthetic construct
  source 1..20: mol_type = other RNA
agtactagttttttaaactg

SEQ ID NO: 512 - RNA, 20 nt, synthetic construct
  source 1..20: mol_type = other RNA
agtactcttgttaaaactct

SEQ ID NO: 513 - RNA, 20 nt, synthetic construct
  source 1..20: mol_type = other RNA
agtagaaataaacctcgtaa

SEQ ID NO: 514 - RNA, 20 nt, synthetic construct
  source 1..20: mol_type = other RNA
agtagtcatctccatttgtt

SEQ ID NO: 515 - RNA, 20 nt, synthetic construct
  source 1..20: mol_type = other RNA
agtatcacttgtcagaattt

SEQ ID NO: 516 - RNA, 20 nt, synthetic construct
  source 1..20: mol_type = other RNA
agtatgtgtaaaaatctgta

SEQ ID NO: 517 - RNA, 20 nt, synthetic construct
  source 1..20: mol_type = other RNA
agtattgacaaaggtaggtc

SEQ ID NO: 518 - RNA, 20 nt, synthetic construct
  source 1..20: mol_type = other RNA
agtatttaattctgcttcat

SEQ ID NO: 519 - RNA, 20 nt, synthetic construct
  source 1..20: mol_type = other RNA
agtcaagtttagagttttaa

SEQ ID NO: 520 - RNA, 20 nt, synthetic construct
  source 1..20: mol_type = other RNA
agtcaatgtgacttagtagt

SEQ ID NO: 521 - RNA, 20 nt, synthetic construct
  source 1..20: mol_type = other RNA
agtcacattgactttaacat

SEQ ID NO: 522 - RNA, 20 nt, synthetic construct
  source 1..20: mol_type = other RNA
agtcactgtctatttaagat

SEQ ID NO: 523 - RNA, 20 nt, synthetic construct
  source 1..20: mol_type = other RNA
agtcatctccatttgtttaa

SEQ ID NO: 524 - RNA, 20 nt, synthetic construct
  source 1..20: mol_type = other RNA
agtccctaaattatagaaat

SEQ ID NO: 525 - RNA, 20 nt, synthetic construct
  source 1..20: mol_type = other RNA
agtcctctgtatttagtcaa

SEQ ID NO: 526 - RNA, 20 nt, synthetic construct
  source 1..20: mol_type = other RNA
agtctgtggtcctgaaaatt

SEQ ID NO: 527 - RNA, 20 nt, synthetic construct
  source 1..20: mol_type = other RNA
agtgactttaagataaaaaa

SEQ ID NO: 528 - RNA, 20 nt, synthetic construct
  source 1..20: mol_type = other RNA
agtgatacctcatgttaaag

SEQ ID NO: 529 - RNA, 20 nt, synthetic construct
  source 1..20: mol_type = other RNA
agtgatactgtggtaaaaaa

SEQ ID NO: 530 - RNA, 20 nt, synthetic construct
  source 1..20: mol_type = other RNA
agtgcccaagttatatggtg

SEQ ID NO: 531 - RNA, 20 nt, synthetic construct
  source 1..20: mol_type = other RNA
agttaaagtttatatttccc

SEQ ID NO: 532 - RNA, 20 nt, synthetic construct
  source 1..20: mol_type = other RNA
agttaatgtggtctaataat

SEQ ID NO: 533 - RNA, 20 nt, synthetic construct
  source 1..20: mol_type = other RNA
agttactgaacgtttaaaca

SEQ ID NO: 534 - RNA, 20 nt, synthetic construct
  source 1..20: mol_type = other RNA
agttatatggtgacctacct

SEQ ID NO: 535 - RNA, 20 nt, synthetic construct
  source 1..20: mol_type = other RNA
agttatttaataagttcacc

SEQ ID NO: 536 - RNA, 20 nt, synthetic construct
  source 1..20: mol_type = other RNA
agttcacctattgattataa

SEQ ID NO: 537 - RNA, 20 nt, synthetic construct
  source 1..20: mol_type = other RNA
agttcgctgtctttaaacaa

SEQ ID NO: 538 - RNA, 20 nt, synthetic construct
  source 1..20: mol_type = other RNA
agttcttaaatgttgtagta

SEQ ID NO: 539 - RNA, 20 nt, synthetic construct
  source 1..20: mol_type = other RNA
agttgtgatattagctcata

SEQ ID NO: 540 - RNA, 20 nt, synthetic construct
  source 1..20: mol_type = other RNA
agtttaaaaaactagtactc

SEQ ID NO: 541 - RNA, 20 nt, synthetic construct
  source 1..20: mol_type = other RNA
agtttagagttttaacaaga

SEQ ID NO: 542 - RNA, 20 nt, synthetic construct
  source 1..20: mol_type = other RNA
agtttatatttcccctaaat

SEQ ID NO: 543 - RNA, 20 nt, synthetic construct
  source 1..20: mol_type = other RNA
agttttaacaagagtactag

SEQ ID NO: 544 - RNA, 20 nt, synthetic construct
  source 1..20: mol_type = other RNA
agttttgaaattaatactac

SEQ ID NO: 545 - RNA, 20 nt, synthetic construct
  source 1..20: mol_type = other RNA
agttttttaaactgggaaag

SEQ ID NO: 546 - RNA, 20 nt, synthetic construct
  source 1..20: mol_type = other RNA
ataaaagatatgtatgatct

SEQ ID NO: 547 - RNA, 20 nt, synthetic construct
  source 1..20: mol_type = other RNA
ataaacaaagacccagtccc

SEQ ID NO: 548 - RNA, 20 nt, synthetic construct
  source 1..20: mol_type = other RNA
ataaacatgcaagaataatt

SEQ ID NO: 549 - RNA, 20 nt, synthetic construct
  source 1..20: mol_type = other RNA
ataaacctcgtaacaagtta

SEQ ID NO: 550 - RNA, 20 nt, synthetic construct
  source 1..20: mol_type = other RNA
ataaactttaactcgatgcc

SEQ ID NO: 551 - RNA, 20 nt, synthetic construct
  source 1..20: mol_type = other RNA
ataaattctgacaagtgata

SEQ ID NO: 552 - RNA, 20 nt, synthetic construct
  source 1..20: mol_type = other RNA
ataaccttaaagaataccgt

SEQ ID NO: 553 - RNA, 20 nt, synthetic construct
  source 1..20: mol_type = other RNA
ataacttgggcactatatcc

SEQ ID NO: 554 - RNA, 20 nt, synthetic construct
  source 1..20: mol_type = other RNA
ataagaattttgattgagaa

SEQ ID NO: 555 - RNA, 20 nt, synthetic construct
  source 1..20: mol_type = other RNA
ataaggtatagtgatacctc

SEQ ID NO: 556 - RNA, 20 nt, synthetic construct
  source 1..20: mol_type = other RNA
ataagttcacctattgatta

SEQ ID NO: 557 - RNA, 20 nt, synthetic construct
  source 1..20: mol_type = other RNA
ataagttcgctgtctttaaa

SEQ ID NO: 558 - RNA, 20 nt, synthetic construct
  source 1..20: mol_type = other RNA
ataatcaataggtgaactta

SEQ ID NO: 559 - RNA, 20 nt, synthetic construct
  source 1..20: mol_type = other RNA
ataatctagattgtgaccat

SEQ ID NO: 560 - RNA, 20 nt, synthetic construct
  source 1..20: mol_type = other RNA
ataatctataattttcagga

SEQ ID NO: 561 - RNA, 20 nt, synthetic construct
  source 1..20: mol_type = other RNA
ataatctggtattaaatcct

SEQ ID NO: 562 - RNA, 20 nt, synthetic construct
  source 1..20: mol_type = other RNA
ataatgctaagtattgacaa

SEQ ID NO: 563 - RNA, 20 nt, synthetic construct
  source 1..20: mol_type = other RNA
ataattgtaaaggaatcttg

SEQ ID NO: 564 - RNA, 20 nt, synthetic construct
  source 1..20: mol_type = other RNA
ataatttaaacattaacctc

SEQ ID NO: 565 - RNA, 20 nt, synthetic construct
  source 1..20: mol_type = other RNA
ataatttagggactgggtct

SEQ ID NO: 566 - RNA, 20 nt, synthetic construct
  source 1..20: mol_type = other RNA
ataatttggagtaaatgttt

SEQ ID NO: 567 - RNA, 20 nt, synthetic construct
  source 1..20: mol_type = other RNA
ataattttcaggaccacaga

SEQ ID NO: 568 - RNA, 20 nt, synthetic construct
  source 1..20: mol_type = other RNA
atacaaattttttaccacag

SEQ ID NO: 569 - RNA, 20 nt, synthetic construct
  source 1..20: mol_type = other RNA
atacaatcacataaccttaa

SEQ ID NO: 570 - RNA, 20 nt, synthetic construct
  source 1..20: mol_type = other RNA
atacagaggactggtaattg

SEQ ID NO: 571 - RNA, 20 nt, synthetic construct
  source 1..20: mol_type = other RNA
atacagtatttaattctgct

SEQ ID NO: 572 - RNA, 20 nt, synthetic construct
  source 1..20: mol_type = other RNA
atacataatgctaagtattg

SEQ ID NO: 573 - RNA, 20 nt, synthetic construct
  source 1..20: mol_type = other RNA
atacatgcttgtcaggctgt

SEQ ID NO: 574 - RNA, 20 nt, synthetic construct
  source 1..20: mol_type = other RNA
atacattcgtgtaggttttc

SEQ ID NO: 575 - RNA, 20 nt, synthetic construct
  source 1..20: mol_type = other RNA
ataccaaaatggctcctctc

SEQ ID NO: 576 - RNA, 20 nt, synthetic construct
  source 1..20: mol_type = other RNA
ataccagattattagaccac

SEQ ID NO: 577 - RNA, 20 nt, synthetic construct
  source 1..20: mol_type = other RNA
ataccgtttacatttctcaa

SEQ ID NO: 578 - RNA, 20 nt, synthetic construct
  source 1..20: mol_type = other RNA
atacctcatgttaaagtcaa

SEQ ID NO: 579 - RNA, 20 nt, synthetic construct
  source 1..20: mol_type = other RNA
atactacaacatttaagaac

SEQ ID NO: 580 - RNA, 20 nt, synthetic construct
  source 1..20: mol_type = other RNA
atactctgtgctgacgattt

SEQ ID NO: 581 - RNA, 20 nt, synthetic construct
  source 1..20: mol_type = other RNA
atactgtggtaaaaaatttg

SEQ ID NO: 582 - RNA, 20 nt, synthetic construct
  source 1..20: mol_type = other RNA
atacttagcattatgtattt

SEQ ID NO: 583 - RNA, 20 nt, synthetic construct
  source 1..20: mol_type = other RNA
atagacagtgactttaagat

SEQ ID NO: 584 - RNA, 20 nt, synthetic construct
  source 1..20: mol_type = other RNA
atagaggaagcaactcatat

SEQ ID NO: 585 - RNA, 20 nt, synthetic construct
  source 1..20: mol_type = other RNA
atagatcatacatatctttt

SEQ ID NO: 586 - RNA, 20 nt, synthetic construct
  source 1..20: mol_type = other RNA
ataggtgaacttattaaata

SEQ ID NO: 587 - RNA, 20 nt, synthetic construct
  source 1..20: mol_type = other RNA
atagtgatacctcatgttaa

SEQ ID NO: 588 - RNA, 20 nt, synthetic construct
  source 1..20: mol_type = other RNA
atagtgcccaagttatatgg

SEQ ID NO: 589 - RNA, 20 nt, synthetic construct
  source 1..20: mol_type = other RNA
atataaactttaactcgatg

SEQ ID NO: 590 - RNA, 20 nt, synthetic construct
  source 1..20: mol_type = other RNA
atataacttgggcactatat

SEQ ID NO: 591 - RNA, 20 nt, synthetic construct
  source 1..20: mol_type = other RNA
atatacatgcttgtcaggct

SEQ ID NO: 592 - RNA, 20 nt, synthetic construct
  source 1..20: mol_type = other RNA
atatagtgcccaagttatat

SEQ ID NO: 593 - RNA, 20 nt, synthetic construct
  source 1..20: mol_type = other RNA
atatatacatgcttgtcagg

SEQ ID NO: 594 - RNA, 20 nt, synthetic construct
  source 1..20: mol_type = other RNA
atatatgacatgtatattgg

SEQ ID NO: 595 - RNA, 20 nt, synthetic construct
  source 1..20: mol_type = other RNA
atatatgagttgcttcctct

SEQ ID NO: 596 - RNA, 20 nt, synthetic construct
  source 1..20: mol_type = other RNA
atatcaaacatttactccaa

SEQ ID NO: 597 - RNA, 20 nt, synthetic construct
  source 1..20: mol_type = other RNA
atatcacaactttcccagtt

SEQ ID NO: 598 - RNA, 20 nt, synthetic construct
  source 1..20: mol_type = other RNA
atatcctttaacaaatgggt

SEQ ID NO: 599 - RNA, 20 nt, synthetic construct
  source 1..20: mol_type = other RNA
atatcttttatatatgtgac

SEQ ID NO: 600 - RNA, 20 nt, synthetic construct
  source 1..20: mol_type = other RNA
atatgacatgtatattggat

SEQ ID NO: 601 - RNA, 20 nt, synthetic construct
  source 1..20: mol_type = other RNA
atatgagctaatatcacaac

SEQ ID NO: 602 - RNA, 20 nt, synthetic construct
  source 1..20: mol_type = other RNA
atatgagttgcttcctctat

SEQ ID NO: 603 - RNA, 20 nt, synthetic construct
  source 1..20: mol_type = other RNA
atatgatgccttttaaaata

SEQ ID NO: 604 - RNA, 20 nt, synthetic construct
  source 1..20: mol_type = other RNA
atatgattttttaaaactgc

SEQ ID NO: 605 - RNA, 20 nt, synthetic construct
  source 1..20: mol_type = other RNA
atatgctgtgattctaatac

SEQ ID NO: 606 - RNA, 20 nt, synthetic construct
  source 1..20: mol_type = other RNA
atatggtgacctacctttgt

SEQ ID NO: 607 - RNA, 20 nt, synthetic construct
  source 1..20: mol_type = other RNA
atatgtatgatctatgtgaa

SEQ ID NO: 608 - RNA, 20 nt, synthetic construct
  source 1..20: mol_type = other RNA
atatgtcacatatataaaag

SEQ ID NO: 609 - RNA, 20 nt, synthetic construct
  source 1..20: mol_type = other RNA
atatgttcattcttactgta

SEQ ID NO: 610 - RNA, 20 nt, synthetic construct
  source 1..20: mol_type = other RNA
atattagctcatatgatgcc

SEQ ID NO: 611 - RNA, 20 nt, synthetic construct
  source 1..20: mol_type = other RNA
atatttacttaggattcaca

SEQ ID NO: 612 - RNA, 20 nt, synthetic construct
  source 1..20: mol_type = other RNA
atatttaggggaaatataaa

SEQ ID NO: 613 - RNA, 20 nt, synthetic construct
  source 1..20: mol_type = other RNA
atatttcccctaaatatgct

SEQ ID NO: 614 - RNA, 20 nt, synthetic construct
  source 1..20: mol_type = other RNA
atatttgtggcatcgagtta

SEQ ID NO: 615 - RNA, 20 nt, synthetic construct
  source 1..20: mol_type = other RNA
atattttgttccagaaaagt

SEQ ID NO: 616 - RNA, 20 nt, synthetic construct
  source 1..20: mol_type = other RNA
atcaaacatttactccaaat

SEQ ID NO: 617 - RNA, 20 nt, synthetic construct
  source 1..20: mol_type = other RNA
atcaataggtgaacttatta

SEQ ID NO: 618 - RNA, 20 nt, synthetic construct
  source 1..20: mol_type = other RNA
atcaattttagatggtcaca

SEQ ID NO: 619 - RNA, 20 nt, synthetic construct
  source 1..20: mol_type = other RNA
atcacaacagatccctaaat

SEQ ID NO: 620 - RNA, 20 nt, synthetic construct
  source 1..20: mol_type = other RNA
atcacaactttcccagttta

SEQ ID NO: 621 - RNA, 20 nt, synthetic construct
  source 1..20: mol_type = other RNA
atcacagcatatttagggga

SEQ ID NO: 622 - RNA, 20 nt, synthetic construct
  source 1..20: mol_type = other RNA
atcacataaccttaaagaat

SEQ ID NO: 623 - RNA, 20 nt, synthetic construct
  source 1..20: mol_type = other RNA
atcactataccttatttgtt

SEQ ID NO: 624 - RNA, 20 nt, synthetic construct
  source 1..20: mol_type = other RNA
atcacttgtcagaatttatt

SEQ ID NO: 625 - RNA, 20 nt, synthetic construct
  source 1..20: mol_type = other RNA
atcagcgttaatttcgacag

SEQ ID NO: 626 - RNA, 20 nt, synthetic construct
  source 1..20: mol_type = other RNA
atcatatcaaacatttactc

SEQ ID NO: 627 - RNA, 20 nt, synthetic construct
  source 1..20: mol_type = other RNA
atcatatgagctaatatcac

SEQ ID NO: 628 - RNA, 20 nt, synthetic construct
  source 1..20: mol_type = other RNA
atccaatatacatgtcatat

SEQ ID NO: 629 - RNA, 20 nt, synthetic construct
  source 1..20: mol_type = other RNA
atccctaaagattagataca

SEQ ID NO: 630 - RNA, 20 nt, synthetic construct
  source 1..20: mol_type = other RNA
atccctaaatccctaaagat

SEQ ID NO: 631 - RNA, 20 nt, synthetic construct
  source 1..20: mol_type = other RNA
atccctaaatccctaaatcc

SEQ ID NO: 632 - RNA, 20 nt, synthetic construct
  source 1..20: mol_type = other RNA
atcctaagtaaatattttgt

SEQ ID NO: 633 - RNA, 20 nt, synthetic construct
  source 1..20: mol_type = other RNA
atccttaagagaaagcttga

SEQ ID NO: 634 - RNA, 20 nt, synthetic construct
  source 1..20: mol_type = other RNA
atcctttaacaaatgggttt

SEQ ID NO: 635 - RNA, 20 nt, synthetic construct
  source 1..20: mol_type = other RNA
atcgacatcacaacagatcc

SEQ ID NO: 636 - RNA, 20 nt, synthetic construct
  source 1..20: mol_type = other RNA
atcgagttaaagtttatatt

SEQ ID NO: 637 - RNA, 20 nt, synthetic construct
  source 1..20: mol_type = other RNA
atcgtcagcacagagtatgt

SEQ ID NO: 638 - RNA, 20 nt, synthetic construct
  source 1..20: mol_type = other RNA
atctaaaattgattcccaca

SEQ ID NO: 639 - RNA, 20 nt, synthetic construct
  source 1..20: mol_type = other RNA
atctaatctttagggattta

SEQ ID NO: 640 - RNA, 20 nt, synthetic construct
  source 1..20: mol_type = other RNA
atctagattataatcaatag

SEQ ID NO: 641 - RNA, 20 nt, synthetic construct
  source 1..20: mol_type = other RNA
atctagattgtgaccatcta

SEQ ID NO: 642 - RNA, 20 nt, synthetic construct
  source 1..20: mol_type = other RNA
atctataattttcaggacca

SEQ ID NO: 643 - RNA, 20 nt, synthetic construct
  source 1..20: mol_type = other RNA
atctatgtgaatcctaagta

SEQ ID NO: 644 - RNA, 20 nt, synthetic construct
  source 1..20: mol_type = other RNA
atctatttctcaagctttct

SEQ ID NO: 645 - RNA, 20 nt, synthetic construct
  source 1..20: mol_type = other RNA
atctccatttgtttaaagac

SEQ ID NO: 646 - RNA, 20 nt, synthetic construct
  source 1..20: mol_type = other RNA
atctgacaagattcctttac

SEQ ID NO: 647 - RNA, 20 nt, synthetic construct
  source 1..20: mol_type = other RNA
atctggtattaaatccttaa

SEQ ID NO: 648 - RNA, 20 nt, synthetic construct
  source 1..20: mol_type = other RNA
atctgttgtgatgtcgataa

SEQ ID NO: 649 - RNA, 20 nt, synthetic construct
  source 1..20: mol_type = other RNA
atcttaaagtcactgtctat

SEQ ID NO: 650 - RNA, 20 nt, synthetic construct
  source 1..20: mol_type = other RNA
atcttaaatagacagtgact

SEQ ID NO: 651 - RNA, 20 nt, synthetic construct
  source 1..20: mol_type = other RNA
atcttgtcagattacagtaa

SEQ ID NO: 652 - RNA, 20 nt, synthetic construct
  source 1..20: mol_type = other RNA
atctttagggatttagggat

SEQ ID NO: 653 - RNA, 20 nt, synthetic construct
  source 1..20: mol_type = other RNA
atcttttatatatgtgacat

SEQ ID NO: 654 - RNA, 20 nt, synthetic construct
  source 1..20: mol_type = other RNA
atgaaacctaatgaagcaga

SEQ ID NO: 655 - RNA, 20 nt, synthetic construct
  source 1..20: mol_type = other RNA
atgaacatatttgtggcatc

SEQ ID NO: 656 - RNA, 20 nt, synthetic construct
  source 1..20: mol_type = other RNA
atgaagcagaattaaatact

SEQ ID NO: 657 - RNA, 20 nt, synthetic construct
  source 1..20: mol_type = other RNA
atgaagcatcagtttaaaaa

SEQ ID NO: 658 - RNA, 20 nt, synthetic construct
  source 1..20: mol_type = other RNA
atgaattattttgcatttga

SEQ ID NO: 659 - RNA, 20 nt, synthetic construct
  source 1..20: mol_type = other RNA
atgacatgtatattggataa

SEQ ID NO: 660 - RNA, 20 nt, synthetic construct
  source 1..20: mol_type = other RNA
atgactactaagtcacattg

SEQ ID NO: 661 - RNA, 20 nt, synthetic construct
  source 1..20: mol_type = other RNA
atgagctaatatcacaactt

SEQ ID NO: 662 - RNA, 20 nt, synthetic construct
  source 1..20: mol_type = other RNA
atgaggtatcactatacctt

SEQ ID NO: 663 - RNA, 20 nt, synthetic construct
  source 1..20: mol_type = other RNA
atgaggttaatgtttaaatt

SEQ ID NO: 664 - RNA, 20 nt, synthetic construct
  source 1..20: mol_type = other RNA
atgatctatgtgaatcctaa

SEQ ID NO: 665 - RNA, 20 nt, synthetic construct
  source 1..20: mol_type = other RNA
atgatgccttttaaaataaa

SEQ ID NO: 666 - RNA, 20 nt, synthetic construct
  source 1..20: mol_type = other RNA
atgatttatttatgaaacct

SEQ ID NO: 667 - RNA, 20 nt, synthetic construct
  source 1..20: mol_type = other RNA
atgattttttaaaactgcca

SEQ ID NO: 668 - RNA, 20 nt, synthetic construct
  source 1..20: mol_type = other RNA
atgccacaaatatgttcatt

SEQ ID NO: 669 - RNA, 20 nt, synthetic construct
  source 1..20: mol_type = other RNA
atgccttttaaaataaaagt

SEQ ID NO: 670 - RNA, 20 nt, synthetic construct
  source 1..20: mol_type = other RNA
atgctaagtattgacaaagg

SEQ ID NO: 671 - RNA, 20 nt, synthetic construct
  source 1..20: mol_type = other RNA
atgctgtgattctaatacat

SEQ ID NO: 672 - RNA, 20 nt, synthetic construct
  source 1..20: mol_type = other RNA
atgcttcattttgctacaaa

SEQ ID NO: 673 - RNA, 20 nt, synthetic construct
  source 1..20: mol_type = other RNA
atgcttgtcaggctgtttaa

SEQ ID NO: 674 - RNA, 20 nt, synthetic construct
  source 1..20: mol_type = other RNA
atggagatgactactaagtc

SEQ ID NO: 675 - RNA, 20 nt, synthetic construct
  source 1..20: mol_type = other RNA
atggctcctctcttccccca

SEQ ID NO: 676 - RNA, 20 nt, synthetic construct
  source 1..20: mol_type = other RNA
atggtcacaatctagattat

SEQ ID NO: 677 - RNA, 20 nt, synthetic construct
  source 1..20: mol_type = other RNA
atggtgacctacctttgtca

SEQ ID NO: 678 - RNA, 20 nt, synthetic construct
  source 1..20: mol_type = other RNA
atgtaaacggtattctttaa

SEQ ID NO: 679 - RNA, 20 nt, synthetic construct
  source 1..20: mol_type = other RNA
atgtatattggataatttga

SEQ ID NO: 680 - RNA, 20 nt, synthetic construct
  source 1..20: mol_type = other RNA
atgtatgatctatgtgaatc

SEQ ID NO: 681 - RNA, 20 nt, synthetic construct
  source 1..20: mol_type = other RNA
atgtattagaatcacagcat

SEQ ID NO: 682 - RNA, 20 nt, synthetic construct
  source 1..20: mol_type = other RNA
atgtatttcaaattatccaa

SEQ ID NO: 683 - RNA, 20 nt, synthetic construct
  source 1..20: mol_type = other RNA
atgtcacatatataaaagat

SEQ ID NO: 684 - RNA, 20 nt, synthetic construct
  source 1..20: mol_type = other RNA
atgtcgataaacatgcaaga

SEQ ID NO: 685 - RNA, 20 nt, synthetic construct
  source 1..20: mol_type = other RNA
atgtgaatcctaagtaaata

SEQ ID NO: 686 - RNA, 20 nt, synthetic construct
  source 1..20: mol_type = other RNA
atgtgacttagtagtcatct

SEQ ID NO: 687 - RNA, 20 nt, synthetic construct
  source 1..20: mol_type = other RNA
atgtgattgtatgtttaatc

SEQ ID NO: 688 - RNA, 20 nt, synthetic construct
  source 1..20: mol_type = other RNA
atgtgggaatcaattttaga

SEQ ID NO: 689 - RNA, 20 nt, synthetic construct
  source 1..20: mol_type = other RNA
atgtggtctaataatctggt

SEQ ID NO: 690 - RNA, 20 nt, synthetic construct
  source 1..20: mol_type = other RNA
atgtgtaaaaatctgtaata

SEQ ID NO: 691 - RNA, 20 nt, synthetic construct
  source 1..20: mol_type = other RNA
atgttaaagtcaatgtgact

SEQ ID NO: 692 - RNA, 20 nt, synthetic construct
  source 1..20: mol_type = other RNA
atgttcattcttactgtaat

SEQ ID NO: 693 - RNA, 20 nt, synthetic construct
  source 1..20: mol_type = other RNA
atgttgtagtattaatttca

SEQ ID NO: 694 - RNA, 20 nt, synthetic construct
  source 1..20: mol_type = other RNA
atgtttaaattattgccttt

SEQ ID NO: 695 - RNA, 20 nt, synthetic construct
  source 1..20: mol_type = other RNA
atgtttaatcttaaatagac

SEQ ID NO: 696 - RNA, 20 nt, synthetic construct
  source 1..20: mol_type = other RNA
atgtttatcgacatcacaac

SEQ ID NO: 697 - RNA, 20 nt, synthetic construct
  source 1..20: mol_type = other RNA
attaaaataagttcgctgtc

SEQ ID NO: 698 - RNA, 20 nt, synthetic construct
  source 1..20: mol_type = other RNA
attaaacatacaatcacata

SEQ ID NO: 699 - RNA, 20 nt, synthetic construct
  source 1..20: mol_type = other RNA
attaaacccatttgttaaag

SEQ ID NO: 700 - RNA, 20 nt, synthetic construct
  source 1..20: mol_type = other RNA
attaaatccttaagagaaag

SEQ ID NO: 701 - RNA, 20 nt, synthetic construct
  source 1..20: mol_type = other RNA
attaacctcattccaagtta

SEQ ID NO: 702 - RNA, 20 nt, synthetic construct
  source 1..20: mol_type = other RNA
attaacttggaatgaggtta

SEQ ID NO: 703 - RNA, 20 nt, synthetic construct
  source 1..20: mol_type = other RNA
attacagatttttacacata

SEQ ID NO: 704 - RNA, 20 nt, synthetic construct
  source 1..20: mol_type = other RNA
attacagtaagaatgaacat

SEQ ID NO: 705 - RNA, 20 nt, synthetic construct
  source 1..20: mol_type = other RNA
attaccagtcctctgtattt

SEQ ID NO: 706 - RNA, 20 nt, synthetic construct
  source 1..20: mol_type = other RNA
attagaatcacagcatattt

SEQ ID NO: 707 - RNA, 20 nt, synthetic construct
  source 1..20: mol_type = other RNA
attagaccacattaacttgg

SEQ ID NO: 708 - RNA, 20 nt, synthetic construct
  source 1..20: mol_type = other RNA
attagctcatatgatgcctt

SEQ ID NO: 709 - RNA, 20 nt, synthetic construct
  source 1..20: mol_type = other RNA
attataatcaataggtgaac

SEQ ID NO: 710 - RNA, 20 nt, synthetic construct
  source 1..20: mol_type = other RNA
attataatctagattgtgac

SEQ ID NO: 711 - RNA, 20 nt, synthetic construct
  source 1..20: mol_type = other RNA
attatccaatatacatgtca

SEQ ID NO: 712 - RNA, 20 nt, synthetic construct
  source 1..20: mol_type = other RNA
attattagaccacattaact

SEQ ID NO: 713 - RNA, 20 nt, synthetic construct
  source 1..20: mol_type = other RNA
attattcttgcatgtttatc

SEQ ID NO: 714 - RNA, 20 nt, synthetic construct
  source 1..20: mol_type = other RNA
attattgccttttaaatttg

SEQ ID NO: 715 - RNA, 20 nt, synthetic construct
  source 1..20: mol_type = other RNA
attattttgtacttttctgg

SEQ ID NO: 716 - RNA, 20 nt, synthetic construct
  source 1..20: mol_type = other RNA
attattttgtagcaaaatga

SEQ ID NO: 717 - RNA, 20 nt, synthetic construct
  source 1..20: mol_type = other RNA
attcaataaacaaagaccca

SEQ ID NO: 718 - RNA, 20 nt, synthetic construct
  source 1..20: mol_type = other RNA
attcacatagatcatacata

SEQ ID NO: 719 - RNA, 20 nt, synthetic construct
  source 1..20: mol_type = other RNA
attccaagttaatgtggtct

SEQ ID NO: 720 - RNA, 20 nt, synthetic construct
  source 1..20: mol_type = other RNA
attcccacatcacaaaattt

SEQ ID NO: 721 - RNA, 20 nt, synthetic construct
  source 1..20: mol_type = other RNA
attcctttacaattatttgt

SEQ ID NO: 722 - RNA, 20 nt, synthetic construct
  source 1..20: mol_type = other RNA
attcgtgtaggttttcaagt

SEQ ID NO: 723 - RNA, 20 nt, synthetic construct
  source 1..20: mol_type = other RNA
attctaatacattcgtgtag

SEQ ID NO: 724 - RNA, 20 nt, synthetic construct
  source 1..20: mol_type = other RNA
attctgacaagtgatactgt

SEQ ID NO: 725 - RNA, 20 nt, synthetic construct
  source 1..20: mol_type = other RNA
attctgcttcattaggtttc

SEQ ID NO: 726 - RNA, 20 nt, synthetic construct
  source 1..20: mol_type = other RNA
attcttactgtaatctgaca

SEQ ID NO: 727 - RNA, 20 nt, synthetic construct
  source 1..20: mol_type = other RNA
attcttgcatgtttatcgac

SEQ ID NO: 728 - RNA, 20 nt, synthetic construct
  source 1..20: mol_type = other RNA
attctttaaggttatgtgat

SEQ ID NO: 729 - RNA, 20 nt, synthetic construct
  source 1..20: mol_type = other RNA
attgacaaaggtaggtcacc

SEQ ID NO: 730 - RNA, 20 nt, synthetic construct
  source 1..20: mol_type = other RNA
attgactttaacatgaggta

SEQ ID NO: 731 - RNA, 20 nt, synthetic construct
  source 1..20: mol_type = other RNA
attgagaaatgtaaacggta

SEQ ID NO: 732 - RNA, 20 nt, synthetic construct
  source 1..20: mol_type = other RNA
attgattataatctagattg

SEQ ID NO: 733 - RNA, 20 nt, synthetic construct
  source 1..20: mol_type = other RNA
attgattcccacatcacaaa

SEQ ID NO: 734 - RNA, 20 nt, synthetic construct
  source 1..20: mol_type = other RNA
attggacaatttcaaatgca

SEQ ID NO: 735 - RNA, 20 nt, synthetic construct
  source 1..20: mol_type = other RNA
attggataatttgaaataca

SEQ ID NO: 736 - RNA, 20 nt, synthetic construct
  source 1..20: mol_type = other RNA
attgtaaaggaatcttgtca

SEQ ID NO: 737 - RNA, 20 nt, synthetic construct
  source 1..20: mol_type = other RNA
attgtacagttcttaaatgt

SEQ ID NO: 738 - RNA, 20 nt, synthetic construct
  source 1..20: mol_type = other RNA
attgtccaattttgggggaa

SEQ ID NO: 739 - RNA, 20 nt, synthetic construct
  source 1..20: mol_type = other RNA
attgtgaccatctaaaattg

SEQ ID NO: 740 - RNA, 20 nt, synthetic construct
  source 1..20: mol_type = other RNA
atttaaaatttcttactggc

SEQ ID NO: 741 - RNA, 20 nt, synthetic construct
  source 1..20: mol_type = other RNA
atttaaacattaacctcatt

SEQ ID NO: 742 - RNA, 20 nt, synthetic construct
  source 1..20: mol_type = other RNA
atttaaattattcttgcatg

SEQ ID NO: 743 - RNA, 20 nt, synthetic construct
  source 1..20: mol_type = other RNA
atttaagaactgtacaatta

SEQ ID NO: 744 - RNA, 20 nt, synthetic construct
  source 1..20: mol_type = other RNA
atttaataagttcacctatt

SEQ ID NO: 745 - RNA, 20 nt, synthetic construct
  source 1..20: mol_type = other RNA
atttaataccagattattag

SEQ ID NO: 746 - RNA, 20 nt, synthetic construct
  source 1..20: mol_type = other RNA
atttaatatatgagttgctt

SEQ ID NO: 747 - RNA, 20 nt, synthetic construct
  source 1..20: mol_type = other RNA
atttaattctgcttcattag

SEQ ID NO: 748 - RNA, 20 nt, synthetic construct
  source 1..20: mol_type = other RNA
atttactccaaattattttg

SEQ ID NO: 749 - RNA, 20 nt, synthetic construct
  source 1..20: mol_type = other RNA
atttacttaggattcacata

SEQ ID NO: 750 - RNA, 20 nt, synthetic construct
  source 1..20: mol_type = other RNA
atttagggactgggtctttg

SEQ ID NO: 751 - RNA, 20 nt, synthetic construct
  source 1..20: mol_type = other RNA
atttagggatctgttgtgat

SEQ ID NO: 752 - RNA, 20 nt, synthetic construct
  source 1..20: mol_type = other RNA
atttagggatttagggatct

SEQ ID NO: 753 - RNA, 20 nt, synthetic construct
  source 1..20: mol_type = other RNA
atttaggggaaatataaact

SEQ ID NO: 754 - RNA, 20 nt, synthetic construct
  source 1..20: mol_type = other RNA
atttagtcaagtttagagtt

SEQ ID NO: 755 - RNA, 20 nt, synthetic construct
  source 1..20: mol_type = other RNA
atttatgaaacctaatgaag

SEQ ID NO: 756 - RNA, 20 nt, synthetic construct
  source 1..20: mol_type = other RNA
atttcaaaactaaaaatcgt

SEQ ID NO: 757 - RNA, 20 nt, synthetic construct
  source 1..20: mol_type = other RNA
atttcccctaaatatgctgt

SEQ ID NO: 758 - RNA, 20 nt, synthetic construct
  source 1..20: mol_type = other RNA
atttcgacagcttagtctgt

SEQ ID NO: 759 - RNA, 20 nt, synthetic construct
  source 1..20: mol_type = other RNA
atttctacttgaaaacctac

SEQ ID NO: 760 - RNA, 20 nt, synthetic construct
  source 1..20: mol_type = other RNA
atttctataatttagggact

SEQ ID NO: 761 - RNA, 20 nt, synthetic construct
  source 1..20: mol_type = other RNA
atttctcaagctttctctta

SEQ ID NO: 762 - RNA, 20 nt, synthetic construct
  source 1..20: mol_type = other RNA
atttctcaatcaaaattctt

SEQ ID NO: 763 - RNA, 20 nt, synthetic construct
  source 1..20: mol_type = other RNA
atttcttactggcagtttta

SEQ ID NO: 764 - RNA, 20 nt, synthetic construct
  source 1..20: mol_type = other RNA
atttgaaatacataatgcta

SEQ ID NO: 765 - RNA, 20 nt, synthetic construct
  source 1..20: mol_type = other RNA
atttgaaattgtccaatttt

SEQ ID NO: 766 - RNA, 20 nt, synthetic construct
  source 1..20: mol_type = other RNA
atttggagtaaatgtttgat

SEQ ID NO: 767 - RNA, 20 nt, synthetic construct
  source 1..20: mol_type = other RNA
atttgtatctaatctttagg

SEQ ID NO: 768 - RNA, 20 nt, synthetic construct
  source 1..20: mol_type = other RNA
atttgtggcatcgagttaaa

SEQ ID NO: 769 - RNA, 20 nt, synthetic construct
  source 1..20: mol_type = other RNA
atttgttaaaggatatagtg

SEQ ID NO: 770 - RNA, 20 nt, synthetic construct
  source 1..20: mol_type = other RNA
atttgtttaaagacagcgaa

SEQ ID NO: 771 - RNA, 20 nt, synthetic construct
  source 1..20: mol_type = other RNA
attttaaaaggcatcatatg

SEQ ID NO: 772 - RNA, 20 nt, synthetic construct
  source 1..20: mol_type = other RNA
attttagatggtcacaatct

SEQ ID NO: 773 - RNA, 20 nt, synthetic construct
  source 1..20: mol_type = other RNA
attttcaggaccacagacta

SEQ ID NO: 774 - RNA, 20 nt, synthetic construct
  source 1..20: mol_type = other RNA
attttgattgagaaatgtaa

SEQ ID NO: 775 - RNA, 20 nt, synthetic construct
  source 1..20: mol_type = other RNA
attttgcatttgaaattgtc

SEQ ID NO: 776 - RNA, 20 nt, synthetic construct
  source 1..20: mol_type = other RNA
attttgggggaagagaggag

SEQ ID NO: 777 - RNA, 20 nt, synthetic construct
  source 1..20: mol_type = other RNA
attttggtattctggcccta

SEQ ID NO: 778 - RNA, 20 nt, synthetic construct
  source 1..20: mol_type = other RNA
attttgtacttttctggaac

SEQ ID NO: 779 - RNA, 20 nt, synthetic construct
  source 1..20: mol_type = other RNA
attttgtagcaaaatgaagc

SEQ ID NO: 780 - RNA, 20 nt, synthetic construct
  source 1..20: mol_type = other RNA
attttgtgatgtgggaatca

SEQ ID NO: 781 - RNA, 20 nt, synthetic construct
  source 1..20: mol_type = other RNA
attttgttccagaaaagtac

SEQ ID NO: 782 - RNA, 20 nt, synthetic construct
  source 1..20: mol_type = other RNA
atttttaaactgatgcttca

SEQ ID NO: 783 - RNA, 20 nt, synthetic construct
  source 1..20: mol_type = other RNA
atttttacacatactctgtg

SEQ ID NO: 784 - RNA, 20 nt, synthetic construct
  source 1..20: mol_type = other RNA
attttttaaaactgccagta

SEQ ID NO: 785 - RNA, 20 nt, synthetic construct
  source 1..20: mol_type = other RNA
attttttaccacagtatcac

SEQ ID NO: 786 - RNA, 20 nt, synthetic construct
  source 1..20: mol_type = other RNA
caaaactaaaaatcgtcagc

SEQ ID NO: 787 - RNA, 20 nt, synthetic construct
  source 1..20: mol_type = other RNA
caaaataatttggagtaaat

SEQ ID NO: 788 - RNA, 20 nt, synthetic construct
  source 1..20: mol_type = other RNA
caaaatatttacttaggatt

SEQ ID NO: 789 - RNA, 20 nt, synthetic construct
  source 1..20: mol_type = other RNA
caaaatgaagcatcagttta

SEQ ID NO: 790 - RNA, 20 nt, synthetic construct
  source 1..20: mol_type = other RNA
caaaatggctcctctcttcc

SEQ ID NO: 791 - RNA, 20 nt, synthetic construct
  source 1..20: mol_type = other RNA
caaaattggacaatttcaaa

SEQ ID NO: 792 - RNA, 20 nt, synthetic construct
  source 1..20: mol_type = other RNA
caaacatttactccaaatta

SEQ ID NO: 793 - RNA, 20 nt, synthetic construct
  source 1..20: mol_type = other RNA
caaagacccagtccctaaat

SEQ ID NO: 794 - RNA, 20 nt, synthetic construct
  source 1..20: mol_type = other RNA
caaaggtaggtcaccatata

SEQ ID NO: 795 - RNA, 20 nt, synthetic construct
  source 1..20: mol_type = other RNA
caaataaggtatagtgatac

SEQ ID NO: 796 - RNA, 20 nt, synthetic construct
  source 1..20: mol_type = other RNA
caaataattgtaaaggaatc

SEQ ID NO: 797 - RNA, 20 nt, synthetic construct
  source 1..20: mol_type = other RNA
caaatagaggaagcaactca

SEQ ID NO: 798 - RNA, 20 nt, synthetic construct
  source 1..20: mol_type = other RNA
caaatatgttcattcttact

SEQ ID NO: 799 - RNA, 20 nt, synthetic construct
  source 1..20: mol_type = other RNA
caaatgcaaaataattcatt

SEQ ID NO: 800 - RNA, 20 nt, synthetic construct
  source 1..20: mol_type = other RNA
caaatggagatgactactaa

SEQ ID NO: 801 - RNA, 20 nt, synthetic construct
  source 1..20: mol_type = other RNA
caaatgggtttaatttaaaa

SEQ ID NO: 802 - RNA, 20 nt, synthetic construct
  source 1..20: mol_type = other RNA
caaattatccaatatacatg

SEQ ID NO: 803 - RNA, 20 nt, synthetic construct
  source 1..20: mol_type = other RNA
caaattattttgtagcaaaa

SEQ ID NO: 804 - RNA, 20 nt, synthetic construct
  source 1..20: mol_type = other RNA
caaatttaaaaggcaataat

SEQ ID NO: 805 - RNA, 20 nt, synthetic construct
  source 1..20: mol_type = other RNA
caaatttttaaactgatgct

SEQ ID NO: 806 - RNA, 20 nt, synthetic construct
  source 1..20: mol_type = other RNA
caaattttttaccacagtat

SEQ ID NO: 807 - RNA, 20 nt, synthetic construct
  source 1..20: mol_type = other RNA
caacagatccctaaatccct

SEQ ID NO: 808 - RNA, 20 nt, synthetic construct
  source 1..20: mol_type = other RNA
caacatttaagaactgtaca

SEQ ID NO: 809 - RNA, 20 nt, synthetic construct
  source 1..20: mol_type = other RNA
caactttcccagtttaaaaa

SEQ ID NO: 810 - RNA, 20 nt, synthetic construct
  source 1..20: mol_type = other RNA
caagagtactagttttttaa

SEQ ID NO: 811 - RNA, 20 nt, synthetic construct
  source 1..20: mol_type = other RNA
caagattcctttacaattat

SEQ ID NO: 812 - RNA, 20 nt, synthetic construct
  source 1..20: mol_type = other RNA
caagcatgtatatatgttta

SEQ ID NO: 813 - RNA, 20 nt, synthetic construct
  source 1..20: mol_type = other RNA
caagctttctcttaaggatt

SEQ ID NO: 814 - RNA, 20 nt, synthetic construct
  source 1..20: mol_type = other RNA
caagtagaaataaacctcgt

SEQ ID NO: 815 - RNA, 20 nt, synthetic construct
  source 1..20: mol_type = other RNA
caagtgatactgtggtaaaa

SEQ ID NO: 816 - RNA, 20 nt, synthetic construct
  source 1..20: mol_type = other RNA
caagttaatgtggtctaata

SEQ ID NO: 817 - RNA, 20 nt, synthetic construct
  source 1..20: mol_type = other RNA
caagttactgaacgtttaaa

SEQ ID NO: 818 - RNA, 20 nt, synthetic construct
  source 1..20: mol_type = other RNA
caagttatatggtgacctac

SEQ ID NO: 819 - RNA, 20 nt, synthetic construct
  source 1..20: mol_type = other RNA
caagtttagagttttaacaa

SEQ ID NO: 820 - RNA, 20 nt, synthetic construct
  source 1..20: mol_type = other RNA
caataaacaaagacccagtc

SEQ ID NO: 821 - RNA, 20 nt, synthetic construct
  source 1..20: mol_type = other RNA
caataatttaaacattaacc

SEQ ID NO: 822 - RNA, 20 nt, synthetic construct
  source 1..20: mol_type = other RNA
caatacttagcattatgtat

SEQ ID NO: 823 - RNA, 20 nt, synthetic construct
  source 1..20: mol_type = other RNA
caataggtgaacttattaaa

SEQ ID NO: 824 - RNA, 20 nt, synthetic construct
  source 1..20: mol_type = other RNA
caatatacatgtcatatata

SEQ ID NO: 825 - RNA, 20 nt, synthetic construct
  source 1..20: mol_type = other RNA
caatcacataaccttaaaga

SEQ ID NO: 826 - RNA, 20 nt, synthetic construct
  source 1..20: mol_type = other RNA
caatctagattataatcaat

SEQ ID NO: 827 - RNA, 20 nt, synthetic construct
  source 1..20: mol_type = other RNA
caatgtgacttagtagtcat

SEQ ID NO: 828 - RNA, 20 nt, synthetic construct
  source 1..20: mol_type = other RNA
caattaccagtcctctgtat

SEQ ID NO: 829 - RNA, 20 nt, synthetic construct
  source 1..20: mol_type = other RNA
caattatttgttttcatagt

SEQ ID NO: 830 - RNA, 20 nt, synthetic construct
  source 1..20: mol_type = other RNA
caatttcaaatgcaaaataa

SEQ ID NO: 831 - RNA, 20 nt, synthetic construct
  source 1..20: mol_type = other RNA
caattttagatggtcacaat

SEQ ID NO: 832 - RNA, 20 nt, synthetic construct
  source 1..20: mol_type = other RNA
caattttgggggaagagagg

SEQ ID NO: 833 - RNA, 20 nt, synthetic construct
  source 1..20: mol_type = other RNA
cacaaatatgttcattctta

SEQ ID NO: 834 - RNA, 20 nt, synthetic construct
  source 1..20: mol_type = other RNA
cacaacagatccctaaatcc

SEQ ID NO: 835 - RNA, 20 nt, synthetic construct
  source 1..20: mol_type = other RNA
cacaactttcccagtttaaa

SEQ ID NO: 836 - RNA, 20 nt, synthetic construct
  source 1..20: mol_type = other RNA
cacaatctagattataatca

SEQ ID NO: 837 - RNA, 20 nt, synthetic construct
  source 1..20: mol_type = other RNA
cacagactaagctgtcgaaa

SEQ ID NO: 838 - RNA, 20 nt, synthetic construct
  source 1..20: mol_type = other RNA
cacagagtatgtgtaaaaat

SEQ ID NO: 839 - RNA, 20 nt, synthetic construct
  source 1..20: mol_type = other RNA
cacagcatatttaggggaaa

SEQ ID NO: 840 - RNA, 20 nt, synthetic construct
  source 1..20: mol_type = other RNA
cacagtatcacttgtcagaa

SEQ ID NO: 841 - RNA, 20 nt, synthetic construct
  source 1..20: mol_type = other RNA
cacataaccttaaagaatac

SEQ ID NO: 842 - RNA, 20 nt, synthetic construct
  source 1..20: mol_type = other RNA
cacatactctgtgctgacga

SEQ ID NO: 843 - RNA, 20 nt, synthetic construct
  source 1..20: mol_type = other RNA
cacatagatcatacatatct

SEQ ID NO: 844 - RNA, 20 nt, synthetic construct
  source 1..20: mol_type = other RNA
cacatatataaaagatatgt

SEQ ID NO: 845 - RNA, 20 nt, synthetic construct
  source 1..20: mol_type = other RNA
cacatcacaaaatttaaaac

SEQ ID NO: 846 - RNA, 20 nt, synthetic construct
  source 1..20: mol_type = other RNA
cacattaacttggaatgagg

SEQ ID NO: 847 - RNA, 20 nt, synthetic construct
  source 1..20: mol_type = other RNA
cacattgactttaacatgag

SEQ ID NO: 848 - RNA, 20 nt, synthetic construct
  source 1..20: mol_type = other RNA
caccatataacttgggcact

SEQ ID NO: 849 - RNA, 20 nt, synthetic construct
  source 1..20: mol_type = other RNA
cacctattgattataatcta

SEQ ID NO: 850 - RNA, 20 nt, synthetic construct
  source 1..20: mol_type = other RNA
cacgaatgtattagaatcac

SEQ ID NO: 851 - RNA, 20 nt, synthetic construct
  source 1..20: mol_type = other RNA
cactataccttatttgttaa

SEQ ID NO: 852 - RNA, 20 nt, synthetic construct
  source 1..20: mol_type = other RNA
cactatatcctttaacaaat

SEQ ID NO: 853 - RNA, 20 nt, synthetic construct
  source 1..20: mol_type = other RNA
cactgtctatttaagattaa

SEQ ID NO: 854 - RNA, 20 nt, synthetic construct
  source 1..20: mol_type = other RNA
cacttaatactatgaaaaca

SEQ ID NO: 855 - RNA, 20 nt, synthetic construct
  source 1..20: mol_type = other RNA
cacttgtcagaatttatttt

SEQ ID NO: 856 - RNA, 20 nt, synthetic construct
  source 1..20: mol_type = other RNA
cagaaaagtacaaaataata

SEQ ID NO: 857 - RNA, 20 nt, synthetic construct
  source 1..20: mol_type = other RNA
cagaataccaaaatggctcc

SEQ ID NO: 858 - RNA, 20 nt, synthetic construct
  source 1..20: mol_type = other RNA
cagaattaaatactgtatta

SEQ ID NO: 859 - RNA, 20 nt, synthetic construct
  source 1..20: mol_type = other RNA
cagactaagctgtcgaaatt

SEQ ID NO: 860 - RNA, 20 nt, synthetic construct
  source 1..20: mol_type = other RNA
cagaggactggtaattgtac

SEQ ID NO: 861 - RNA, 20 nt, synthetic construct
  source 1..20: mol_type = other RNA
cagagtatgtgtaaaaatct

SEQ ID NO: 862 - RNA, 20 nt, synthetic construct
  source 1..20: mol_type = other RNA
cagatccctaaatccctaaa

SEQ ID NO: 863 - RNA, 20 nt, synthetic construct
  source 1..20: mol_type = other RNA
cagattacagtaagaatgaa

SEQ ID NO: 864 - RNA, 20 nt, synthetic construct
  source 1..20: mol_type = other RNA
cagattattagaccacatta

SEQ ID NO: 865 - RNA, 20 nt, synthetic construct
  source 1..20: mol_type = other RNA
cagatttttacacatactct

SEQ ID NO: 866 - RNA, 20 nt, synthetic construct
  source 1..20: mol_type = other RNA
cagcacagagtatgtgtaaa

SEQ ID NO: 867 - RNA, 20 nt, synthetic construct
  source 1..20: mol_type = other RNA
cagcatatttaggggaaata

SEQ ID NO: 868 - RNA, 20 nt, synthetic construct
  source 1..20: mol_type = other RNA
cagcctgacaagcatgtata

SEQ ID NO: 869 - RNA, 20 nt, synthetic construct
  source 1..20: mol_type = other RNA
cagcgaacttattttaatac

SEQ ID NO: 870 - RNA, 20 nt, synthetic construct
  source 1..20: mol_type = other RNA
cagcgttaatttcgacagct

SEQ ID NO: 871 - RNA, 20 nt, synthetic construct
  source 1..20: mol_type = other RNA
cagcttagtctgtggtcctg

SEQ ID NO: 872 - RNA, 20 nt, synthetic construct
  source 1..20: mol_type = other RNA
caggaccacagactaagctg

SEQ ID NO: 873 - RNA, 20 nt, synthetic construct
  source 1..20: mol_type = other RNA
caggctgtttaaacgttcag

SEQ ID NO: 874 - RNA, 20 nt, synthetic construct
  source 1..20: mol_type = other RNA
cagtaacttgttacgaggtt

SEQ ID NO: 875 - RNA, 20 nt, synthetic construct
  source 1..20: mol_type = other RNA
cagtaagaatgaacatattt

SEQ ID NO: 876 - RNA, 20 nt, synthetic construct
  source 1..20: mol_type = other RNA
cagtatcacttgtcagaatt

SEQ ID NO: 877 - RNA, 20 nt, synthetic construct
  source 1..20: mol_type = other RNA
cagtatttaattctgcttca

SEQ ID NO: 878 - RNA, 20 nt, synthetic construct
  source 1..20: mol_type = other RNA
cagtccctaaattatagaaa

SEQ ID NO: 879 - RNA, 20 nt, synthetic construct
  source 1..20: mol_type = other RNA
cagtcctctgtatttagtca

SEQ ID NO: 880 - RNA, 20 nt, synthetic construct
  source 1..20: mol_type = other RNA
cagtgactttaagataaaaa

SEQ ID NO: 881 - RNA, 20 nt, synthetic construct
  source 1..20: mol_type = other RNA
cagttcttaaatgttgtagt

SEQ ID NO: 882 - RNA, 20 nt, synthetic construct
  source 1..20: mol_type = other RNA
cagtttaaaaaactagtact

SEQ ID NO: 883 - RNA, 20 nt, synthetic construct
  source 1..20: mol_type = other RNA
cataaccttaaagaataccg

SEQ ID NO: 884 - RNA, 20 nt, synthetic construct
  source 1..20: mol_type = other RNA
cataatgctaagtattgaca

SEQ ID NO: 885 - RNA, 20 nt, synthetic construct
  source 1..20: mol_type = other RNA
catacaatcacataacctta

SEQ ID NO: 886 - RNA, 20 nt, synthetic construct
  source 1..20: mol_type = other RNA
catactctgtgctgacgatt

SEQ ID NO: 887 - RNA, 20 nt, synthetic construct
  source 1..20: mol_type = other RNA
catagatcatacatatcttt

SEQ ID NO: 888 - RNA, 20 nt, synthetic construct
  source 1..20: mol_type = other RNA
catagtattaagtgttaaaa

SEQ ID NO: 889 - RNA, 20 nt, synthetic construct
  source 1..20: mol_type = other RNA
catataacttgggcactata

SEQ ID NO: 890 - RNA, 20 nt, synthetic construct
  source 1..20: mol_type = other RNA
catatatacatgcttgtcag

SEQ ID NO: 891 - RNA, 20 nt, synthetic construct
  source 1..20: mol_type = other RNA
catatcaaacatttactcca

SEQ ID NO: 892 - RNA, 20 nt, synthetic construct
  source 1..20: mol_type = other RNA
catatcttttatatatgtga

SEQ ID NO: 893 - RNA, 20 nt, synthetic construct
  source 1..20: mol_type = other RNA
catatgagctaatatcacaa

SEQ ID NO: 894 - RNA, 20 nt, synthetic construct
  source 1..20: mol_type = other RNA
catatgatgccttttaaaat

SEQ ID NO: 895 - RNA, 20 nt, synthetic construct
  source 1..20: mol_type = other RNA
catatttaggggaaatataa

SEQ ID NO: 896 - RNA, 20 nt, synthetic construct
  source 1..20: mol_type = other RNA
catatttgtggcatcgagtt

SEQ ID NO: 897 - RNA, 20 nt, synthetic construct
  source 1..20: mol_type = other RNA
catcacaaaatttaaaacaa

SEQ ID NO: 898 - RNA, 20 nt, synthetic construct
  source 1..20: mol_type = other RNA
catcacaacagatccctaaa

SEQ ID NO: 899 - RNA, 20 nt, synthetic construct
  source 1..20: mol_type = other RNA
catcagtttaaaaatttgta

SEQ ID NO: 900 - RNA, 20 nt, synthetic construct
  source 1..20: mol_type = other RNA
catcatatgagctaatatca

SEQ ID NO: 901 - RNA, 20 nt, synthetic construct
  source 1..20: mol_type = other RNA
catcgagttaaagtttatat

SEQ ID NO: 902 - RNA, 20 nt, synthetic construct
  source 1..20: mol_type = other RNA
catctaaaattgattcccac

SEQ ID NO: 903 - RNA, 20 nt, synthetic construct
  source 1..20: mol_type = other RNA
catctccatttgtttaaaga

SEQ ID NO: 904 - RNA, 20 nt, synthetic construct
  source 1..20: mol_type = other RNA
catgaggtatcactatacct

SEQ ID NO: 905 - RNA, 20 nt, synthetic construct
  source 1..20: mol_type = other RNA
catgcaagaataatttaaat

SEQ ID NO: 906 - RNA, 20 nt, synthetic construct
  source 1..20: mol_type = other RNA
catgcttgtcaggctgttta

SEQ ID NO: 907 - RNA, 20 nt, synthetic construct
  source 1..20: mol_type = other RNA
catgtatattggataatttg

SEQ ID NO: 908 - RNA, 20 nt, synthetic construct
  source 1..20: mol_type = other RNA
catgttaaagtcaatgtgac

SEQ ID NO: 909 - RNA, 20 nt, synthetic construct
  source 1..20: mol_type = other RNA
catgtttatcgacatcacaa

SEQ ID NO: 910 - RNA, 20 nt, synthetic construct
  source 1..20: mol_type = other RNA
cattaacctcattccaagtt

SEQ ID NO: 911 - RNA, 20 nt, synthetic construct
  source 1..20: mol_type = other RNA
cattaacttggaatgaggtt

SEQ ID NO: 912 - RNA, 20 nt, synthetic construct
  source 1..20: mol_type = other RNA
cattaggtttcataaataaa

SEQ ID NO: 913 - RNA, 20 nt, synthetic construct
  source 1..20: mol_type = other RNA
cattccaagttaatgtggtc

SEQ ID NO: 914 - RNA, 20 nt, synthetic construct
  source 1..20: mol_type = other RNA
cattcgtgtaggttttcaag

SEQ ID NO: 915 - RNA, 20 nt, synthetic construct
  source 1..20: mol_type = other RNA
cattcttactgtaatctgac

SEQ ID NO: 916 - RNA, 20 nt, synthetic construct
  source 1..20: mol_type = other RNA
cattgactttaacatgaggt

SEQ ID NO: 917 - RNA, 20 nt, synthetic construct
  source 1..20: mol_type = other RNA
catttaagaactgtacaatt

SEQ ID NO: 918 - RNA, 20 nt, synthetic construct
  source 1..20: mol_type = other RNA
catttactccaaattatttt

SEQ ID NO: 919 - RNA, 20 nt, synthetic construct
  source 1..20: mol_type = other RNA
catttctcaatcaaaattct

SEQ ID NO: 920 - RNA, 20 nt, synthetic construct
  source 1..20: mol_type = other RNA
catttgaaattgtccaattt

SEQ ID NO: 921 - RNA, 20 nt, synthetic construct
  source 1..20: mol_type = other RNA
catttgttaaaggatatagt

SEQ ID NO: 922 - RNA, 20 nt, synthetic construct
  source 1..20: mol_type = other RNA
catttgtttaaagacagcga

SEQ ID NO: 923 - RNA, 20 nt, synthetic construct
  source 1..20: mol_type = other RNA
cattttgctacaaaataatt

SEQ ID NO: 924 - RNA, 20 nt, synthetic construct
  source 1..20: mol_type = other RNA
cattttggtattctggccct

SEQ ID NO: 925 - RNA, 20 nt, synthetic construct
  source 1..20: mol_type = other RNA
ccaaaatggctcctctcttc

SEQ ID NO: 926 - RNA, 20 nt, synthetic construct
  source 1..20: mol_type = other RNA
ccaaaattggacaatttcaa

SEQ ID NO: 927 - RNA, 20 nt, synthetic construct
  source 1..20: mol_type = other RNA
ccaaatagaggaagcaactc

SEQ ID NO: 928 - RNA, 20 nt, synthetic construct
  source 1..20: mol_type = other RNA
ccaaattattttgtagcaaa

SEQ ID NO: 929 - RNA, 20 nt, synthetic construct
  source 1..20: mol_type = other RNA
ccaagttaatgtggtctaat

SEQ ID NO: 930 - RNA, 20 nt, synthetic construct
  source 1..20: mol_type = other RNA
ccaagttatatggtgaccta

SEQ ID NO: 931 - RNA, 20 nt, synthetic construct
  source 1..20: mol_type = other RNA
ccaatatacatgtcatatat

SEQ ID NO: 932 - RNA, 20 nt, synthetic construct
  source 1..20: mol_type = other RNA
ccaattttgggggaagagag

SEQ ID NO: 933 - RNA, 20 nt, synthetic construct
  source 1..20: mol_type = other RNA
ccacaaatatgttcattctt

SEQ ID NO: 934 - RNA, 20 nt, synthetic construct
  source 1..20: mol_type = other RNA
ccacagactaagctgtcgaa

SEQ ID NO: 935 - RNA, 20 nt, synthetic construct
  source 1..20: mol_type = other RNA
ccacagtatcacttgtcaga

SEQ ID NO: 936 - RNA, 20 nt, synthetic construct
  source 1..20: mol_type = other RNA
ccacatcacaaaatttaaaa

SEQ ID NO: 937 - RNA, 20 nt, synthetic construct
  source 1..20: mol_type = other RNA
ccacattaacttggaatgag

SEQ ID NO: 938 - RNA, 20 nt, synthetic construct
  source 1..20: mol_type = other RNA
ccagaaaagtacaaaataat

SEQ ID NO: 939 - RNA, 20 nt, synthetic construct
  source 1..20: mol_type = other RNA
ccagaataccaaaatggctc

SEQ ID NO: 940 - RNA, 20 nt, synthetic construct
  source 1..20: mol_type = other RNA
ccagattattagaccacatt

SEQ ID NO: 941 - RNA, 20 nt, synthetic construct
  source 1..20: mol_type = other RNA
ccagtaagaaattttaaatt

SEQ ID NO: 942 - RNA, 20 nt, synthetic construct
  source 1..20: mol_type = other RNA
ccagtccctaaattatagaa

SEQ ID NO: 943 - RNA, 20 nt, synthetic construct
  source 1..20: mol_type = other RNA
ccagtcctctgtatttagtc

SEQ ID NO: 944 - RNA, 20 nt, synthetic construct
  source 1..20: mol_type = other RNA
ccagtttaaaaaactagtac

SEQ ID NO: 945 - RNA, 20 nt, synthetic construct
  source 1..20: mol_type = other RNA
ccatataacttgggcactat

SEQ ID NO: 946 - RNA, 20 nt, synthetic construct
  source 1..20: mol_type = other RNA
ccatctaaaattgattccca

SEQ ID NO: 947 - RNA, 20 nt, synthetic construct
  source 1..20: mol_type = other RNA
ccatttgttaaaggatatag

SEQ ID NO: 948 - RNA, 20 nt, synthetic construct
  source 1..20: mol_type = other RNA
ccatttgtttaaagacagcg

SEQ ID NO: 949 - RNA, 20 nt, synthetic construct
  source 1..20: mol_type = other RNA
ccattttggtattctggccc

SEQ ID NO: 950 - RNA, 20 nt, synthetic construct
  source 1..20: mol_type = other RNA
cccaaaattggacaatttca

SEQ ID NO: 951 - RNA, 20 nt, synthetic construct
  source 1..20: mol_type = other RNA
cccaagttatatggtgacct

SEQ ID NO: 952 - RNA, 20 nt, synthetic construct
  source 1..20: mol_type = other RNA
cccacatcacaaaatttaaa

SEQ ID NO: 953 - RNA, 20 nt, synthetic construct
  source 1..20: mol_type = other RNA
cccagtccctaaattataga

SEQ ID NO: 954 - RNA, 20 nt, synthetic construct
  source 1..20: mol_type = other RNA
cccagtttaaaaaactagta

SEQ ID NO: 955 - RNA, 20 nt, synthetic construct
  source 1..20: mol_type = other RNA
cccatttgttaaaggatata

SEQ ID NO: 956 - RNA, 20 nt, synthetic construct
  source 1..20: mol_type = other RNA
ccccaaaattggacaatttc

SEQ ID NO: 957 - RNA, 20 nt, synthetic construct
  source 1..20: mol_type = other RNA
cccccaaaattggacaattt

SEQ ID NO: 958 - RNA, 20 nt, synthetic construct
  source 1..20: mol_type = other RNA
cccctaaatatgctgtgatt

SEQ ID NO: 959 - RNA, 20 nt, synthetic construct
  source 1..20: mol_type = other RNA
ccctaaagattagatacaaa

SEQ ID NO: 960 - RNA, 20 nt, synthetic construct
  source 1..20: mol_type = other RNA
ccctaaatatgctgtgattc

SEQ ID NO: 961 - RNA, 20 nt, synthetic construct
  source 1..20: mol_type = other RNA
ccctaaatccctaaagatta

SEQ ID NO: 962 - RNA, 20 nt, synthetic construct
  source 1..20: mol_type = other RNA
ccctaaatccctaaatccct

SEQ ID NO: 963 - RNA, 20 nt, synthetic construct
  source 1..20: mol_type = other RNA
ccctaaattatagaaattta

SEQ ID NO: 964 - RNA, 20 nt, synthetic construct
  source 1..20: mol_type = other RNA
ccgtttacatttctcaatca

SEQ ID NO: 965 - RNA, 20 nt, synthetic construct
  source 1..20: mol_type = other RNA
cctaaagattagatacaaat

SEQ ID NO: 966 - RNA, 20 nt, synthetic construct
  source 1..20: mol_type = other RNA
cctaaatatgctgtgattct

SEQ ID NO: 967 - RNA, 20 nt, synthetic construct
  source 1..20: mol_type = other RNA
cctaaatccctaaagattag

SEQ ID NO: 968 - RNA, 20 nt, synthetic construct
  source 1..20: mol_type = other RNA
cctaaatccctaaatcccta

SEQ ID NO: 969 - RNA, 20 nt, synthetic construct
  source 1..20: mol_type = other RNA
cctaagtaaatattttgttc

SEQ ID NO: 970 - RNA, 20 nt, synthetic construct
  source 1..20: mol_type = other RNA
cctaatgaagcagaattaaa

SEQ ID NO: 971 - RNA, 20 nt, synthetic construct
  source 1..20: mol_type = other RNA
cctacacgaatgtattagaa

SEQ ID NO: 972 - RNA, 20 nt, synthetic construct
  source 1..20: mol_type = other RNA
cctacctttgtcaatactta

SEQ ID NO: 973 - RNA, 20 nt, synthetic construct
  source 1..20: mol_type = other RNA
cctattgattataatctaga

SEQ ID NO: 974 - RNA, 20 nt, synthetic construct
  source 1..20: mol_type = other RNA
cctcatgttaaagtcaatgt

SEQ ID NO: 975 - RNA, 20 nt, synthetic construct
  source 1..20: mol_type = other RNA
cctcattccaagttaatgtg

SEQ ID NO: 976 - RNA, 20 nt, synthetic construct
  source 1..20: mol_type = other RNA
cctcgtaacaagttactgaa

SEQ ID NO: 977 - RNA, 20 nt, synthetic construct
  source 1..20: mol_type = other RNA
cctctcttcccccaaaattg

SEQ ID NO: 978 - RNA, 20 nt, synthetic construct
  source 1..20: mol_type = other RNA
cctctgtatttagtcaagtt

SEQ ID NO: 979 - RNA, 20 nt, synthetic construct
  source 1..20: mol_type = other RNA
cctgaaaattatagattatt

SEQ ID NO: 980 - RNA, 20 nt, synthetic construct
  source 1..20: mol_type = other RNA
cctgacaagcatgtatatat

SEQ ID NO: 981 - RNA, 20 nt, synthetic construct
  source 1..20: mol_type = other RNA
ccttaaagaataccgtttac

SEQ ID NO: 982 - RNA, 20 nt, synthetic construct
  source 1..20: mol_type = other RNA
ccttaagagaaagcttgaga

SEQ ID NO: 983 - RNA, 20 nt, synthetic construct
  source 1..20: mol_type = other RNA
cctttaacaaatgggtttaa

SEQ ID NO: 984 - RNA, 20 nt, synthetic construct
  source 1..20: mol_type = other RNA
cctttacaattatttgtttt

SEQ ID NO: 985 - RNA, 20 nt, synthetic construct
  source 1..20: mol_type = other RNA
cctttattattttgtacttt

SEQ ID NO: 986 - RNA, 20 nt, synthetic construct
  source 1..20: mol_type = other RNA
cctttgtcaatacttagcat

SEQ ID NO: 987 - RNA, 20 nt, synthetic construct
  source 1..20: mol_type = other RNA
ccttttaaaataaaagtctc

SEQ ID NO: 988 - RNA, 20 nt, synthetic construct
  source 1..20: mol_type = other RNA
cgaaattaacgctgattttt

SEQ ID NO: 989 - RNA, 20 nt, synthetic construct
  source 1..20: mol_type = other RNA
cgaacttattttaatacagt

SEQ ID NO: 990 - RNA, 20 nt, synthetic construct
  source 1..20: mol_type = other RNA
cgaatgtattagaatcacag

SEQ ID NO: 991 - RNA, 20 nt, synthetic construct
  source 1..20: mol_type = other RNA
cgacagcttagtctgtggtc

SEQ ID NO: 992 - RNA, 20 nt, synthetic construct
  source 1..20: mol_type = other RNA
cgacatcacaacagatccct

SEQ ID NO: 993 - RNA, 20 nt, synthetic construct
  source 1..20: mol_type = other RNA
cgaggtttatttctacttga

SEQ ID NO: 994 - RNA, 20 nt, synthetic construct
  source 1..20: mol_type = other RNA
cgagttaaagtttatatttc

SEQ ID NO: 995 - RNA, 20 nt, synthetic construct
  source 1..20: mol_type = other RNA
cgataaacatgcaagaataa

SEQ ID NO: 996 - RNA, 20 nt, synthetic construct
  source 1..20: mol_type = other RNA
cgatgccacaaatatgttca

SEQ ID NO: 997 - RNA, 20 nt, synthetic construct
  source 1..20: mol_type = other RNA
cgatttttagttttgaaatt

SEQ ID NO: 998 - RNA, 20 nt, synthetic construct
  source 1..20: mol_type = other RNA
cgctgtctttaaacaaatgg

SEQ ID NO: 999 - RNA, 20 nt, synthetic construct
  source 1..20: mol_type = other RNA
cggtattctttaaggttatg

SEQ ID NO: 1000 - RNA, 20 nt, synthetic construct
  source 1..20: mol_type = other RNA
cgtaacaagttactgaacgt

SEQ ID NO: 1001 - RNA, 20 nt, synthetic construct
  source 1..20: mol_type = other RNA
cgtcagcacagagtatgtgt

SEQ ID NO: 1002 - RNA, 20 nt, synthetic construct
  source 1..20: mol_type = other RNA
cgtgtaggttttcaagtaga

SEQ ID NO: 1003 - RNA, 20 nt, synthetic construct
  source 1..20: mol_type = other RNA
cgttaatttcgacagcttag

SEQ ID NO: 1004 - RNA, 20 nt, synthetic construct
  source 1..20: mol_type = other RNA
cgttcagtaacttgttacga

SEQ ID NO: 1005 - RNA, 20 nt, synthetic construct
  source 1..20: mol_type = other RNA
cgtttaaacagcctgacaag

SEQ ID NO: 1006 - RNA, 20 nt, synthetic construct
  source 1..20: mol_type = other RNA
cgtttacatttctcaatcaa

SEQ ID NO: 1007 - RNA, 20 nt, synthetic construct
  source 1..20: mol_type = other RNA
ctaaaaatcgtcagcacaga

SEQ ID NO: 1008 - RNA, 20 nt, synthetic construct
  source 1..20: mol_type = other RNA
ctaaaattgattcccacatc

SEQ ID NO: 1009 - RNA, 20 nt, synthetic construct
  source 1..20: mol_type = other RNA
ctaaacttgactaaatacag

SEQ ID NO: 1010 - RNA, 20 nt, synthetic construct
  source 1..20: mol_type = other RNA
ctaaagattagatacaaatt

SEQ ID NO: 1011 - RNA, 20 nt, synthetic construct
  source 1..20: mol_type = other RNA
ctaaatacagaggactggta

SEQ ID NO: 1012 - RNA, 20 nt, synthetic construct
  source 1..20: mol_type = other RNA
ctaaatatgctgtgattcta

SEQ ID NO: 1013 - RNA, 20 nt, synthetic construct
  source 1..20: mol_type = other RNA
ctaaatccctaaagattaga

SEQ ID NO: 1014 - RNA, 20 nt, synthetic construct
  source 1..20: mol_type = other RNA
ctaaatccctaaatccctaa

SEQ ID NO: 1015 - RNA, 20 nt, synthetic construct
  source 1..20: mol_type = other RNA
ctaagctgtcgaaattaacg

SEQ ID NO: 1016 - RNA, 20 nt, synthetic construct
  source 1..20: mol_type = other RNA
ctaagtaaatattttgttcc

SEQ ID NO: 1017 - RNA, 20 nt, synthetic construct
  source 1..20: mol_type = other RNA
ctaagtattgacaaaggtag

SEQ ID NO: 1018 - RNA, 20 nt, synthetic construct
  source 1..20: mol_type = other RNA
ctaagtcacattgactttaa

SEQ ID NO: 1019 - RNA, 20 nt, synthetic construct
  source 1..20: mol_type = other RNA
ctaataatctggtattaaat

SEQ ID NO: 1020 - RNA, 20 nt, synthetic construct
  source 1..20: mol_type = other RNA
ctaatacattcgtgtaggtt

SEQ ID NO: 1021 - RNA, 20 nt, synthetic construct
  source 1..20: mol_type = other RNA
ctaatatcacaactttccca

SEQ ID NO: 1022 - RNA, 20 nt, synthetic construct
  source 1..20: mol_type = other RNA
ctaatctttagggatttagg

SEQ ID NO: 1023 - RNA, 20 nt, synthetic construct
  source 1..20: mol_type = other RNA
ctaatgaagcagaattaaat

SEQ ID NO: 1024 - RNA, 20 nt, synthetic construct
  source 1..20: mol_type = other RNA
ctacaaaataatttggagta

SEQ ID NO: 1025 - RNA, 20 nt, synthetic construct
  source 1..20: mol_type = other RNA
ctacaacatttaagaactgt

SEQ ID NO: 1026 - RNA, 20 nt, synthetic construct
  source 1..20: mol_type = other RNA
ctacacgaatgtattagaat

SEQ ID NO: 1027 - RNA, 20 nt, synthetic construct
  source 1..20: mol_type = other RNA
ctacctttgtcaatacttag

SEQ ID NO: 1028 - RNA, 20 nt, synthetic construct
  source 1..20: mol_type = other RNA
ctactaagtcacattgactt

SEQ ID NO: 1029 - RNA, 20 nt, synthetic construct
  source 1..20: mol_type = other RNA
ctacttgaaaacctacacga

SEQ ID NO: 1030 - RNA, 20 nt, synthetic construct
  source 1..20: mol_type = other RNA
ctagattataatcaataggt

SEQ ID NO: 1031 - RNA, 20 nt, synthetic construct
  source 1..20: mol_type = other RNA
ctagattgtgaccatctaaa

SEQ ID NO: 1032 - RNA, 20 nt, synthetic construct
  source 1..20: mol_type = other RNA
ctagtactcttgttaaaact

SEQ ID NO: 1033 - RNA, 20 nt, synthetic construct
  source 1..20: mol_type = other RNA
ctagttttttaaactgggaa

SEQ ID NO: 1034 - RNA, 20 nt, synthetic construct
  source 1..20: mol_type = other RNA
ctataatttagggactgggt

SEQ ID NO: 1035 - RNA, 20 nt, synthetic construct
  source 1..20: mol_type = other RNA
ctataattttcaggaccaca

SEQ ID NO: 1036 - RNA, 20 nt, synthetic construct
  source 1..20: mol_type = other RNA
ctataccttatttgttaaaa

SEQ ID NO: 1037 - RNA, 20 nt, synthetic construct
  source 1..20: mol_type = other RNA
ctatatcctttaacaaatgg

SEQ ID NO: 1038 - RNA, 20 nt, synthetic construct
  source 1..20: mol_type = other RNA
ctatgaaaacaaataattgt

SEQ ID NO: 1039 - RNA, 20 nt, synthetic construct
  source 1..20: mol_type = other RNA
ctatgtgaatcctaagtaaa

SEQ ID NO: 1040 - RNA, 20 nt, synthetic construct
  source 1..20: mol_type = other RNA
ctattgattataatctagat

SEQ ID NO: 1041 - RNA, 20 nt, synthetic construct
  source 1..20: mol_type = other RNA
ctatttaagattaaacatac

SEQ ID NO: 1042 - RNA, 20 nt, synthetic construct
  source 1..20: mol_type = other RNA
ctatttctcaagctttctct

SEQ ID NO: 1043 - RNA, 20 nt, synthetic construct
  source 1..20: mol_type = other RNA
ctcaagctttctcttaagga

SEQ ID NO: 1044 - RNA, 20 nt, synthetic construct
  source 1..20: mol_type = other RNA
ctcaatcaaaattcttataa

SEQ ID NO: 1045 - RNA, 20 nt, synthetic construct
  source 1..20: mol_type = other RNA
ctcatatgatgccttttaaa

SEQ ID NO: 1046 - RNA, 20 nt, synthetic construct
  source 1..20: mol_type = other RNA
ctcatgttaaagtcaatgtg

SEQ ID NO: 1047 - RNA, 20 nt, synthetic construct
  source 1..20: mol_type = other RNA
ctcattccaagttaatgtgg

SEQ ID NO: 1048 - RNA, 20 nt, synthetic construct
  source 1..20: mol_type = other RNA
ctccaaattattttgtagca

SEQ ID NO: 1049 - RNA, 20 nt, synthetic construct
  source 1..20: mol_type = other RNA
ctccatttgtttaaagacag

SEQ ID NO: 1050 - RNA, 20 nt, synthetic construct
  source 1..20: mol_type = other RNA
ctcctctcttcccccaaaat

SEQ ID NO: 1051 - RNA, 20 nt, synthetic construct
  source 1..20: mol_type = other RNA
ctcgatgccacaaatatgtt

SEQ ID NO: 1052 - RNA, 20 nt, synthetic construct
  source 1..20: mol_type = other RNA
ctcgtaacaagttactgaac

SEQ ID NO: 1053 - RNA, 20 nt, synthetic construct
  source 1..20: mol_type = other RNA
ctctaaacttgactaaatac

SEQ ID NO: 1054 - RNA, 20 nt, synthetic construct
  source 1..20: mol_type = other RNA
ctctcttcccccaaaattgg

SEQ ID NO: 1055 - RNA, 20 nt, synthetic construct
  source 1..20: mol_type = other RNA
ctctgtatttagtcaagttt

SEQ ID NO: 1056 - RNA, 20 nt, synthetic construct
  source 1..20: mol_type = other RNA
ctctgtgctgacgattttta

SEQ ID NO: 1057 - RNA, 20 nt, synthetic construct
  source 1..20: mol_type = other RNA
ctcttaaggatttaatacca

SEQ ID NO: 1058 - RNA, 20 nt, synthetic construct
  source 1..20: mol_type = other RNA
ctcttcccccaaaattggac

SEQ ID NO: 1059 - RNA, 20 nt, synthetic construct
  source 1..20: mol_type = other RNA
ctcttgttaaaactctaaac

SEQ ID NO: 1060 - RNA, 20 nt, synthetic construct
  source 1..20: mol_type = other RNA
ctgaacgtttaaacagcctg

SEQ ID NO: 1061 - RNA, 20 nt, synthetic construct
  source 1..20: mol_type = other RNA
ctgacaagattcctttacaa

SEQ ID NO: 1062 - RNA, 20 nt, synthetic construct
  source 1..20: mol_type = other RNA
ctgacaagcatgtatatatg

SEQ ID NO: 1063 - RNA, 20 nt, synthetic construct
  source 1..20: mol_type = other RNA
ctgacaagtgatactgtggt

SEQ ID NO: 1064 - RNA, 20 nt, synthetic construct
  source 1..20: mol_type = other RNA
ctgacgatttttagttttga

SEQ ID NO: 1065 - RNA, 20 nt, synthetic construct
  source 1..20: mol_type = other RNA
ctgaggcaaatttaaaaggc

SEQ ID NO: 1066 - RNA, 20 nt, synthetic construct
  source 1..20: mol_type = other RNA
ctgatgcttcattttgctac

SEQ ID NO: 1067 - RNA, 20 nt, synthetic construct
  source 1..20: mol_type = other RNA
ctgccagtaagaaattttaa

SEQ ID NO: 1068 - RNA, 20 nt, synthetic construct
  source 1..20: mol_type = other RNA
ctgcttcattaggtttcata

SEQ ID NO: 1069 - RNA, 20 nt, synthetic construct
  source 1..20: mol_type = other RNA
ctggaacaaaatatttactt

SEQ ID NO: 1070 - RNA, 20 nt, synthetic construct
  source 1..20: mol_type = other RNA
ctggcagttttaaaaaatca

SEQ ID NO: 1071 - RNA, 20 nt, synthetic construct
  source 1..20: mol_type = other RNA
ctgggaaagttgtgatatta

SEQ ID NO: 1072 - RNA, 20 nt, synthetic construct
  source 1..20: mol_type = other RNA
ctgggtctttgtttattgaa

SEQ ID NO: 1073 - RNA, 20 nt, synthetic construct
  source 1..20: mol_type = other RNA
ctggtaattgtacagttctt

SEQ ID NO: 1074 - RNA, 20 nt, synthetic construct
  source 1..20: mol_type = other RNA
ctggtattaaatccttaaga

SEQ ID NO: 1075 - RNA, 20 nt, synthetic construct
  source 1..20: mol_type = other RNA
ctgtaatctgacaagattcc

SEQ ID NO: 1076 - RNA, 20 nt, synthetic construct
  source 1..20: mol_type = other RNA
ctgtacaattaccagtcctc

SEQ ID NO: 1077 - RNA, 20 nt, synthetic construct
  source 1..20: mol_type = other RNA
ctgtattaaaataagttcgc

SEQ ID NO: 1078 - RNA, 20 nt, synthetic construct
  source 1..20: mol_type = other RNA
ctgtatttagtcaagtttag

SEQ ID NO: 1079 - RNA, 20 nt, synthetic construct
  source 1..20: mol_type = other RNA
ctgtcgaaattaacgctgat

SEQ ID NO: 1080 - RNA, 20 nt, synthetic construct
  source 1..20: mol_type = other RNA
ctgtctatttaagattaaac

SEQ ID NO: 1081 - RNA, 20 nt, synthetic construct
  source 1..20: mol_type = other RNA
ctgtctttaaacaaatggag

SEQ ID NO: 1082 - RNA, 20 nt, synthetic construct
  source 1..20: mol_type = other RNA
ctgtgattctaatacattcg

SEQ ID NO: 1083 - RNA, 20 nt, synthetic construct
  source 1..20: mol_type = other RNA
ctgtgctgacgatttttagt

SEQ ID NO: 1084 - RNA, 20 nt, synthetic construct
  source 1..20: mol_type = other RNA
ctgtggtaaaaaatttgtat

SEQ ID NO: 1085 - RNA, 20 nt, synthetic construct
  source 1..20: mol_type = other RNA
ctgtggtcctgaaaattata

SEQ ID NO: 1086 - RNA, 20 nt, synthetic construct
  source 1..20: mol_type = other RNA
ctgttgtgatgtcgataaac

SEQ ID NO: 1087 - RNA, 20 nt, synthetic construct
  source 1..20: mol_type = other RNA
ctgtttaaacgttcagtaac

SEQ ID NO: 1088 - RNA, 20 nt, synthetic construct
  source 1..20: mol_type = other RNA
cttaaagaataccgtttaca

SEQ ID NO: 1089 - RNA, 20 nt, synthetic construct
  source 1..20: mol_type = other RNA
cttaaagtcactgtctattt

SEQ ID NO: 1090 - RNA, 20 nt, synthetic construct
  source 1..20: mol_type = other RNA
cttaaatagacagtgacttt

SEQ ID NO: 1091 - RNA, 20 nt, synthetic construct
  source 1..20: mol_type = other RNA
cttaaatgttgtagtattaa

SEQ ID NO: 1092 - RNA, 20 nt, synthetic construct
  source 1..20: mol_type = other RNA
cttaagagaaagcttgagaa

SEQ ID NO: 1093 - RNA, 20 nt, synthetic construct
  source 1..20: mol_type = other RNA
cttaaggatttaataccaga

SEQ ID NO: 1094 - RNA, 20 nt, synthetic construct
  source 1..20: mol_type = other RNA
cttaatactatgaaaacaaa

SEQ ID NO: 1095 - RNA, 20 nt, synthetic construct
  source 1..20: mol_type = other RNA
cttactggcagttttaaaaa

SEQ ID NO: 1096 - RNA, 20 nt, synthetic construct
  source 1..20: mol_type = other RNA
cttactgtaatctgacaaga

SEQ ID NO: 1097 - RNA, 20 nt, synthetic construct
  source 1..20: mol_type = other RNA
cttagcattatgtatttcaa

SEQ ID NO: 1098 - RNA, 20 nt, synthetic construct
  source 1..20: mol_type = other RNA
cttaggattcacatagatca

SEQ ID NO: 1099 - RNA, 20 nt, synthetic construct
  source 1..20: mol_type = other RNA
cttagtagtcatctccattt

SEQ ID NO: 1100 - RNA, 20 nt, synthetic construct
  source 1..20: mol_type = other RNA
cttagtctgtggtcctgaaa

SEQ ID NO: 1101 - RNA, 20 nt, synthetic construct
  source 1..20: mol_type = other RNA
cttcattaggtttcataaat

SEQ ID NO: 1102 - RNA, 20 nt, synthetic construct
  source 1..20: mol_type = other RNA
cttcattttgctacaaaata

SEQ ID NO: 1103 - RNA, 20 nt, synthetic construct
  source 1..20: mol_type = other RNA
cttcccccaaaattggacaa

SEQ ID NO: 1104 - RNA, 20 nt, synthetic construct
  source 1..20: mol_type = other RNA
cttgaaaacctacacgaatg

SEQ ID NO: 1105 - RNA, 20 nt, synthetic construct
  source 1..20: mol_type = other RNA
cttgactaaatacagaggac

SEQ ID NO: 1106 - RNA, 20 nt, synthetic construct
  source 1..20: mol_type = other RNA
cttgcatgtttatcgacatc

SEQ ID NO: 1107 - RNA, 20 nt, synthetic construct
  source 1..20: mol_type = other RNA
cttggaatgaggttaatgtt

SEQ ID NO: 1108 - RNA, 20 nt, synthetic construct
  source 1..20: mol_type = other RNA
cttgggcactatatccttta

SEQ ID NO: 1109 - RNA, 20 nt, synthetic construct
  source 1..20: mol_type = other RNA
cttgtcagaatttattttta

SEQ ID NO: 1110 - RNA, 20 nt, synthetic construct
  source 1..20: mol_type = other RNA
cttgtcagattacagtaaga

SEQ ID NO: 1111 - RNA, 20 nt, synthetic construct
  source 1..20: mol_type = other RNA
cttgtcaggctgtttaaacg

SEQ ID NO: 1112 - RNA, 20 nt, synthetic construct
  source 1..20: mol_type = other RNA
cttgttaaaactctaaactt

SEQ ID NO: 1113 - RNA, 20 nt, synthetic construct
  source 1..20: mol_type = other RNA
cttgttacgaggtttatttc

SEQ ID NO: 1114 - RNA, 20 nt, synthetic construct
  source 1..20: mol_type = other RNA
ctttaaacaaatggagatga

SEQ ID NO: 1115 - RNA, 20 nt, synthetic construct
  source 1..20: mol_type = other RNA
ctttaacaaatgggtttaat

SEQ ID NO: 1116 - RNA, 20 nt, synthetic construct
  source 1..20: mol_type = other RNA
ctttaacatgaggtatcact

SEQ ID NO: 1117 - RNA, 20 nt, synthetic construct
  source 1..20: mol_type = other RNA
ctttaactcgatgccacaaa

SEQ ID NO: 1118 - RNA, 20 nt, synthetic construct
  source 1..20: mol_type = other RNA
ctttaaggttatgtgattgt

SEQ ID NO: 1119 - RNA, 20 nt, synthetic construct
  source 1..20: mol_type = other RNA
ctttacaattatttgttttc

SEQ ID NO: 1120 - RNA, 20 nt, synthetic construct
  source 1..20: mol_type = other RNA
ctttagggatttagggattt

SEQ ID NO: 1121 - RNA, 20 nt, synthetic construct
  source 1..20: mol_type = other RNA
ctttcccagtttaaaaaact

SEQ ID NO: 1122 - RNA, 20 nt, synthetic construct
  source 1..20: mol_type = other RNA
ctttctcttaaggatttaat

SEQ ID NO: 1123 - RNA, 20 nt, synthetic construct
  source 1..20: mol_type = other RNA
ctttgtcaatacttagcatt

SEQ ID NO: 1124 - RNA, 20 nt, synthetic construct
  source 1..20: mol_type = other RNA
cttttaaaataaaagtctct

SEQ ID NO: 1125 - RNA, 20 nt, synthetic construct
  source 1..20: mol_type = other RNA
cttttatatatgtgacatat

SEQ ID NO: 1126 - RNA, 20 nt, synthetic construct
  source 1..20: mol_type = other RNA
cttttattttaaaaggcatc

SEQ ID NO: 1127 - RNA, 20 nt, synthetic construct
  source 1..20: mol_type = other RNA
cttttctggaacaaaatatt

SEQ ID NO: 1128 - RNA, 20 nt, synthetic construct
  source 1..20: mol_type = other RNA
gaaaacaaataattgtaaag

SEQ ID NO: 1129 - RNA, 20 nt, synthetic construct
  source 1..20: mol_type = other RNA
gaaaacctacacgaatgtat

SEQ ID NO: 1130 - RNA, 20 nt, synthetic construct
  source 1..20: mol_type = other RNA
gaaaccaaatagaggaagca

SEQ ID NO: 1131 - RNA, 20 nt, synthetic construct
  source 1..20: mol_type = other RNA
gaaacctaatgaagcagaat

SEQ ID NO: 1132 - RNA, 20 nt, synthetic construct
  source 1..20: mol_type = other RNA
gaaagcttgagaaatagatt

SEQ ID NO: 1133 - RNA, 20 nt, synthetic construct
  source 1..20: mol_type = other RNA
gaaagttgtgatattagctc

SEQ ID NO: 1134 - RNA, 20 nt, synthetic construct
  source 1..20: mol_type = other RNA
gaaataaacctcgtaacaag

SEQ ID NO: 1135 - RNA, 20 nt, synthetic construct
  source 1..20: mol_type = other RNA
gaaatacataatgctaagta

SEQ ID NO: 1136 - RNA, 20 nt, synthetic construct
  source 1..20: mol_type = other RNA
gaaatataaactttaactcg

SEQ ID NO: 1137 - RNA, 20 nt, synthetic construct
  source 1..20: mol_type = other RNA
gaaatgtaaacggtattctt

SEQ ID NO: 1138 - RNA, 20 nt, synthetic construct
  source 1..20: mol_type = other RNA
gaaattaacgctgatttttt

SEQ ID NO: 1139 - RNA, 20 nt, synthetic construct
  source 1..20: mol_type = other RNA
gaaattaatactacaacatt

SEQ ID NO: 1140 - RNA, 20 nt, synthetic construct
  source 1..20: mol_type = other RNA
gaaattgtccaattttgggg

SEQ ID NO: 1141 - RNA, 20 nt, synthetic construct
  source 1..20: mol_type = other RNA
gaaatttaaattattcttgc

SEQ ID NO: 1142 - RNA, 20 nt, synthetic construct
  source 1..20: mol_type = other RNA
gaaattttaaattaaaccca

SEQ ID NO: 1143 - RNA, 20 nt, synthetic construct
  source 1..20: mol_type = other RNA
gaacaaaatatttacttagg

SEQ ID NO: 1144 - RNA, 20 nt, synthetic construct
  source 1..20: mol_type = other RNA
gaacatatttgtggcatcga

SEQ ID NO: 1145 - RNA, 20 nt, synthetic construct
  source 1..20: mol_type = other RNA
gaacgtttaaacagcctgac

SEQ ID NO: 1146 - RNA, 20 nt, synthetic construct
  source 1..20: mol_type = other RNA
gaactgtacaattaccagtc

SEQ ID NO: 1147 - RNA, 20 nt, synthetic construct
  source 1..20: mol_type = other RNA
gaacttattttaatacagta

SEQ ID NO: 1148 - RNA, 20 nt, synthetic construct
  source 1..20: mol_type = other RNA
gaagagaggagccattttgg

SEQ ID NO: 1149 - RNA, 20 nt, synthetic construct
  source 1..20: mol_type = other RNA
gaagcaactcatatattaaa

SEQ ID NO: 1150 - RNA, 20 nt, synthetic construct
  source 1..20: mol_type = other RNA
gaagcagaattaaatactgt

SEQ ID NO: 1151 - RNA, 20 nt, synthetic construct
  source 1..20: mol_type = other RNA
gaagcatcagtttaaaaatt

SEQ ID NO: 1152 - RNA, 20 nt, synthetic construct
  source 1..20: mol_type = other RNA
gaataccaaaatggctcctc

SEQ ID NO: 1153 - RNA, 20 nt, synthetic construct
  source 1..20: mol_type = other RNA
gaataccgtttacatttctc

SEQ ID NO: 1154 - RNA, 20 nt, synthetic construct
  source 1..20: mol_type = other RNA
gaatcaattttagatggtca

SEQ ID NO: 1155 - RNA, 20 nt, synthetic construct
  source 1..20: mol_type = other RNA
gaatcacagcatatttaggg

SEQ ID NO: 1156 - RNA, 20 nt, synthetic construct
  source 1..20: mol_type = other RNA
gaatcctaagtaaatatttt

SEQ ID NO: 1157 - RNA, 20 nt, synthetic construct
  source 1..20: mol_type = other RNA
gaatcttgtcagattacagt

SEQ ID NO: 1158 - RNA, 20 nt, synthetic construct
  source 1..20: mol_type = other RNA
gaatgaacatatttgtggca

SEQ ID NO: 1159 - RNA, 20 nt, synthetic construct
  source 1..20: mol_type = other RNA
gaatgaggttaatgtttaaa

SEQ ID NO: 1160 - RNA, 20 nt, synthetic construct
  source 1..20: mol_type = other RNA
gaatgtattagaatcacagc

SEQ ID NO: 1161 - RNA, 20 nt, synthetic construct
  source 1..20: mol_type = other RNA
gaattattttgcatttgaaa

SEQ ID NO: 1162 - RNA, 20 nt, synthetic construct
  source 1..20: mol_type = other RNA
gaattttgattgagaaatgt

SEQ ID NO: 1163 - RNA, 20 nt, synthetic construct
  source 1..20: mol_type = other RNA
gacaaaggtaggtcaccata

SEQ ID NO: 1164 - RNA, 20 nt, synthetic construct
  source 1..20: mol_type = other RNA
gacaagattcctttacaatt

SEQ ID NO: 1165 - RNA, 20 nt, synthetic construct
  source 1..20: mol_type = other RNA
gacaagcatgtatatatgtt

SEQ ID NO: 1166 - RNA, 20 nt, synthetic construct
  source 1..20: mol_type = other RNA
gacaagtgatactgtggtaa

SEQ ID NO: 1167 - RNA, 20 nt, synthetic construct
  source 1..20: mol_type = other RNA
gacaatttcaaatgcaaaat

SEQ ID NO: 1168 - RNA, 20 nt, synthetic construct
  source 1..20: mol_type = other RNA
gacagcgaacttattttaat

SEQ ID NO: 1169 - RNA, 20 nt, synthetic construct
  source 1..20: mol_type = other RNA
gacagcttagtctgtggtcc

SEQ ID NO: 1170 - RNA, 20 nt, synthetic construct
  source 1..20: mol_type = other RNA
gacagtgactttaagataaa

SEQ ID NO: 1171 - RNA, 20 nt, synthetic construct
  source 1..20: mol_type = other RNA
gacatcacaacagatcccta

SEQ ID NO: 1172 - RNA, 20 nt, synthetic construct
  source 1..20: mol_type = other RNA
gacatgtatattggataatt

SEQ ID NO: 1173 - RNA, 20 nt, synthetic construct
  source 1..20: mol_type = other RNA
gaccacagactaagctgtcg

SEQ ID NO: 1174 - RNA, 20 nt, synthetic construct
  source 1..20: mol_type = other RNA
gaccacattaacttggaatg

SEQ ID NO: 1175 - RNA, 20 nt, synthetic construct
  source 1..20: mol_type = other RNA
gaccatctaaaattgattcc

SEQ ID NO: 1176 - RNA, 20 nt, synthetic construct
  source 1..20: mol_type = other RNA
gacccagtccctaaattata

SEQ ID NO: 1177 - RNA, 20 nt, synthetic construct
  source 1..20: mol_type = other RNA
gacctacctttgtcaatact

SEQ ID NO: 1178 - RNA, 20 nt, synthetic construct
  source 1..20: mol_type = other RNA
gacgatttttagttttgaaa

SEQ ID NO: 1179 - RNA, 20 nt, synthetic construct
  source 1..20: mol_type = other RNA
gactaaatacagaggactgg

SEQ ID NO: 1180 - RNA, 20 nt, synthetic construct
  source 1..20: mol_type = other RNA
gactaagctgtcgaaattaa

SEQ ID NO: 1181 - RNA, 20 nt, synthetic construct
  source 1..20: mol_type = other RNA
gactactaagtcacattgac

SEQ ID NO: 1182 - RNA, 20 nt, synthetic construct
  source 1..20: mol_type = other RNA
gactgggtctttgtttattg

SEQ ID NO: 1183 - RNA, 20 nt, synthetic construct
  source 1..20: mol_type = other RNA
gactggtaattgtacagttc

SEQ ID NO: 1184 - RNA, 20 nt, synthetic construct
  source 1..20: mol_type = other RNA
gacttagtagtcatctccat

SEQ ID NO: 1185 - RNA, 20 nt, synthetic construct
  source 1..20: mol_type = other RNA
gactttaacatgaggtatca

SEQ ID NO: 1186 - RNA, 20 nt, synthetic construct
  source 1..20: mol_type = other RNA
gacttttattttaaaaggca

SEQ ID NO: 1187 - RNA, 20 nt, synthetic construct
  source 1..20: mol_type = other RNA
gagaaagcttgagaaataga

SEQ ID NO: 1188 - RNA, 20 nt, synthetic construct
  source 1..20: mol_type = other RNA
gagaaatgtaaacggtattc

SEQ ID NO: 1189 - RNA, 20 nt, synthetic construct
  source 1..20: mol_type = other RNA
gagacttttattttaaaagg

SEQ ID NO: 1190 - RNA, 20 nt, synthetic construct
  source 1..20: mol_type = other RNA
gagaggagccattttggtat

SEQ ID NO: 1191 - RNA, 20 nt, synthetic construct
  source 1..20: mol_type = other RNA
gagatgactactaagtcaca

SEQ ID NO: 1192 - RNA, 20 nt, synthetic construct
  source 1..20: mol_type = other RNA
gagccattttggtattctgg

SEQ ID NO: 1193 - RNA, 20 nt, synthetic construct
  source 1..20: mol_type = other RNA
gagctaatatcacaactttc

SEQ ID NO: 1194 - RNA, 20 nt, synthetic construct
  source 1..20: mol_type = other RNA
gaggaagcaactcatatatt

SEQ ID NO: 1195 - RNA, 20 nt, synthetic construct
  source 1..20: mol_type = other RNA
gaggactggtaattgtacag

SEQ ID NO: 1196 - RNA, 20 nt, synthetic construct
  source 1..20: mol_type = other RNA
gaggagccattttggtattc

SEQ ID NO: 1197 - RNA, 20 nt, synthetic construct
  source 1..20: mol_type = other RNA
gaggcaaatttaaaaggcaa

SEQ ID NO: 1198 - RNA, 20 nt, synthetic construct
  source 1..20: mol_type = other RNA
gaggtatcactataccttat

SEQ ID NO: 1199 - RNA, 20 nt, synthetic construct
  source 1..20: mol_type = other RNA
gaggttaatgtttaaattat

SEQ ID NO: 1200 - RNA, 20 nt, synthetic construct
  source 1..20: mol_type = other RNA
gaggtttatttctacttgaa

SEQ ID NO: 1201 - RNA, 20 nt, synthetic construct
  source 1..20: mol_type = other RNA
gagtaaatgtttgatatgat

SEQ ID NO: 1202 - RNA, 20 nt, synthetic construct
  source 1..20: mol_type = other RNA
gagtactagttttttaaact

SEQ ID NO: 1203 - RNA, 20 nt, synthetic construct
  source 1..20: mol_type = other RNA
gagtatgtgtaaaaatctgt

SEQ ID NO: 1204 - RNA, 20 nt, synthetic construct
  source 1..20: mol_type = other RNA
gagttaaagtttatatttcc

SEQ ID NO: 1205 - RNA, 20 nt, synthetic construct
  source 1..20: mol_type = other RNA
gagttttaacaagagtacta

SEQ ID NO: 1206 - RNA, 20 nt, synthetic construct
  source 1..20: mol_type = other RNA
gataaacatgcaagaataat

SEQ ID NO: 1207 - RNA, 20 nt, synthetic construct
  source 1..20: mol_type = other RNA
gatacaaattttttaccaca

SEQ ID NO: 1208 - RNA, 20 nt, synthetic construct
  source 1..20: mol_type = other RNA
gatacctcatgttaaagtca

SEQ ID NO: 1209 - RNA, 20 nt, synthetic construct
  source 1..20: mol_type = other RNA
gatactgtggtaaaaaattt

SEQ ID NO: 1210 - RNA, 20 nt, synthetic construct
  source 1..20: mol_type = other RNA
gatatagtgcccaagttata

SEQ ID NO: 1211 - RNA, 20 nt, synthetic construct
  source 1..20: mol_type = other RNA
gatatgtatgatctatgtga

SEQ ID NO: 1212 - RNA, 20 nt, synthetic construct
  source 1..20: mol_type = other RNA
gatattagctcatatgatgc

SEQ ID NO: 1213 - RNA, 20 nt, synthetic construct
  source 1..20: mol_type = other RNA
gatcatacatatcttttata

SEQ ID NO: 1214 - RNA, 20 nt, synthetic construct
  source 1..20: mol_type = other RNA
gatccctaaatccctaaatc

SEQ ID NO: 1215 - RNA, 20 nt, synthetic construct
  source 1..20: mol_type = other RNA
gatctatgtgaatcctaagt

SEQ ID NO: 1216 - RNA, 20 nt, synthetic construct
  source 1..20: mol_type = other RNA
gatctgttgtgatgtcgata

SEQ ID NO: 1217 - RNA, 20 nt, synthetic construct
  source 1..20: mol_type = other RNA
gatgactactaagtcacatt

SEQ ID NO: 1218 - RNA, 20 nt, synthetic construct
  source 1..20: mol_type = other RNA
gatgccacaaatatgttcat

SEQ ID NO: 1219 - RNA, 20 nt, synthetic construct
  source 1..20: mol_type = other RNA
gatgccttttaaaataaaag

SEQ ID NO: 1220 - RNA, 20 nt, synthetic construct
  source 1..20: mol_type = other RNA
gatgcttcattttgctacaa

SEQ ID NO: 1221 - RNA, 20 nt, synthetic construct
  source 1..20: mol_type = other RNA
gatggtcacaatctagatta

SEQ ID NO: 1222 - RNA, 20 nt, synthetic construct
  source 1..20: mol_type = other RNA
gatgtcgataaacatgcaag

SEQ ID NO: 1223 - RNA, 20 nt, synthetic construct
  source 1..20: mol_type = other RNA
gatgtgggaatcaattttag

SEQ ID NO: 1224 - RNA, 20 nt, synthetic construct
  source 1..20: mol_type = other RNA
gattaaacatacaatcacat

SEQ ID NO: 1225 - RNA, 20 nt, synthetic construct
  source 1..20: mol_type = other RNA
gattacagtaagaatgaaca

SEQ ID NO: 1226 - RNA, 20 nt, synthetic construct
  source 1..20: mol_type = other RNA
gattataatcaataggtgaa

SEQ ID NO: 1227 - RNA, 20 nt, synthetic construct
  source 1..20: mol_type = other RNA
gattataatctagattgtga

SEQ ID NO: 1228 - RNA, 20 nt, synthetic construct
  source 1..20: mol_type = other RNA
gattattagaccacattaac

SEQ ID NO: 1229 - RNA, 20 nt, synthetic construct
  source 1..20: mol_type = other RNA
gattcacatagatcatacat

SEQ ID NO: 1230 - RNA, 20 nt, synthetic construct
  source 1..20: mol_type = other RNA
gattcccacatcacaaaatt

SEQ ID NO: 1231 - RNA, 20 nt, synthetic construct
  source 1..20: mol_type = other RNA
gattcctttacaattatttg

SEQ ID NO: 1232 - RNA, 20 nt, synthetic construct
  source 1..20: mol_type = other RNA
gattctaatacattcgtgta

SEQ ID NO: 1233 - RNA, 20 nt, synthetic construct
  source 1..20: mol_type = other RNA
gattgagaaatgtaaacggt

SEQ ID NO: 1234 - RNA, 20 nt, synthetic construct
  source 1..20: mol_type = other RNA
gattgtatgtttaatcttaa

SEQ ID NO: 1235 - RNA, 20 nt, synthetic construct
  source 1..20: mol_type = other RNA
gattgtgaccatctaaaatt

SEQ ID NO: 1236 - RNA, 20 nt, synthetic construct
  source 1..20: mol_type = other RNA
gatttaataccagattatta

SEQ ID NO: 1237 - RNA, 20 nt, synthetic construct
  source 1..20: mol_type = other RNA
gatttagggatctgttgtga

SEQ ID NO: 1238 - RNA, 20 nt, synthetic construct
  source 1..20: mol_type = other RNA
gatttagggatttagggatc

SEQ ID NO: 1239 - RNA, 20 nt, synthetic construct
  source 1..20: mol_type = other RNA
gatttatttatgaaacctaa

SEQ ID NO: 1240 - RNA, 20 nt, synthetic construct
  source 1..20: mol_type = other RNA
gatttttacacatactctgt

SEQ ID NO: 1241 - RNA, 20 nt, synthetic construct
  source 1..20: mol_type = other RNA
gattttttaaaactgccagt

SEQ ID NO: 1242 - RNA, 20 nt, synthetic construct
  source 1..20: mol_type = other RNA
gcaaaatgaagcatcagttt

SEQ ID NO: 1243 - RNA, 20 nt, synthetic construct
  source 1..20: mol_type = other RNA
gcaaatttaaaaggcaataa

SEQ ID NO: 1244 - RNA, 20 nt, synthetic construct
  source 1..20: mol_type = other RNA
gcaactcatatattaaataa

SEQ ID NO: 1245 - RNA, 20 nt, synthetic construct
  source 1..20: mol_type = other RNA
gcaagaataatttaaatttc

SEQ ID NO: 1246 - RNA, 20 nt, synthetic construct
  source 1..20: mol_type = other RNA
gcaataatttaaacattaac

SEQ ID NO: 1247 - RNA, 20 nt, synthetic construct
  source 1..20: mol_type = other RNA
gcacagagtatgtgtaaaaa

SEQ ID NO: 1248 - RNA, 20 nt, synthetic construct
  source 1..20: mol_type = other RNA
gcactatatcctttaacaaa

SEQ ID NO: 1249 - RNA, 20 nt, synthetic construct
  source 1..20: mol_type = other RNA
gcagaattaaatactgtatt

SEQ ID NO: 1250 - RNA, 20 nt, synthetic construct
  source 1..20: mol_type = other RNA
gcagttttaaaaaatcatat

SEQ ID NO: 1251 - RNA, 20 nt, synthetic construct
  source 1..20: mol_type = other RNA
gcatatttaggggaaatata

SEQ ID NO: 1252 - RNA, 20 nt, synthetic construct
  source 1..20: mol_type = other RNA
gcatcagtttaaaaatttgt

SEQ ID NO: 1253 - RNA, 20 nt, synthetic construct
  source 1..20: mol_type = other RNA
gcatcatatgagctaatatc

SEQ ID NO: 1254 - RNA, 20 nt, synthetic construct
  source 1..20: mol_type = other RNA
gcatcgagttaaagtttata

SEQ ID NO: 1255 - RNA, 20 nt, synthetic construct
  source 1..20: mol_type = other RNA
gcatgtatatatgtttaaaa

SEQ ID NO: 1256 - RNA, 20 nt, synthetic construct
  source 1..20: mol_type = other RNA
gcatgtttatcgacatcaca

SEQ ID NO: 1257 - RNA, 20 nt, synthetic construct
  source 1..20: mol_type = other RNA
gcattatgtatttcaaatta

SEQ ID NO: 1258 - RNA, 20 nt, synthetic construct
  source 1..20: mol_type = other RNA
gcatttgaaattgtccaatt

SEQ ID NO: 1259 - RNA, 20 nt, synthetic construct
  source 1..20: mol_type = other RNA
gccacaaatatgttcattct

SEQ ID NO: 1260 - RNA, 20 nt, synthetic construct
  source 1..20: mol_type = other RNA
gccagaataccaaaatggct

SEQ ID NO: 1261 - RNA, 20 nt, synthetic construct
  source 1..20: mol_type = other RNA
gccagtaagaaattttaaat

SEQ ID NO: 1262 - RNA, 20 nt, synthetic construct
  source 1..20: mol_type = other RNA
gccattttggtattctggcc

SEQ ID NO: 1263 - RNA, 20 nt, synthetic construct
  source 1..20: mol_type = other RNA
gcccaagttatatggtgacc

SEQ ID NO: 1264 - RNA, 20 nt, synthetic construct
  source 1..20: mol_type = other RNA
gcctgacaagcatgtatata

SEQ ID NO: 1265 - RNA, 20 nt, synthetic construct
  source 1..20: mol_type = other RNA
gccttttaaaataaaagtct

SEQ ID NO: 1266 - RNA, 20 nt, synthetic construct
  source 1..20: mol_type = other RNA
gcgaacttattttaatacag

SEQ ID NO: 1267 - RNA, 20 nt, synthetic construct
  source 1..20: mol_type = other RNA
gcgttaatttcgacagctta

SEQ ID NO: 1268 - RNA, 20 nt, synthetic construct
  source 1..20: mol_type = other RNA
gctaagtattgacaaaggta

SEQ ID NO: 1269 - RNA, 20 nt, synthetic construct
  source 1..20: mol_type = other RNA
gctaatatcacaactttccc

SEQ ID NO: 1270 - RNA, 20 nt, synthetic construct
  source 1..20: mol_type = other RNA
gctacaaaataatttggagt

SEQ ID NO: 1271 - RNA, 20 nt, synthetic construct
  source 1..20: mol_type = other RNA
gctcatatgatgccttttaa

SEQ ID NO: 1272 - RNA, 20 nt, synthetic construct
  source 1..20: mol_type = other RNA
gctcctctcttcccccaaaa

SEQ ID NO: 1273 - RNA, 20 nt, synthetic construct
  source 1..20: mol_type = other RNA
gctgacgatttttagttttg

SEQ ID NO: 1274 - RNA, 20 nt, synthetic construct
  source 1..20: mol_type = other RNA
gctgtcgaaattaacgctga

SEQ ID NO: 1275 - RNA, 20 nt, synthetic construct
  source 1..20: mol_type = other RNA
gctgtctttaaacaaatgga

SEQ ID NO: 1276 - RNA, 20 nt, synthetic construct
  source 1..20: mol_type = other RNA
gctgtgattctaatacattc

SEQ ID NO: 1277 - RNA, 20 nt, synthetic construct
  source 1..20: mol_type = other RNA
gctgtttaaacgttcagtaa

SEQ ID NO: 1278 - RNA, 20 nt, synthetic construct
  source 1..20: mol_type = other RNA
gcttagtctgtggtcctgaa

SEQ ID NO: 1279 - RNA, 20 nt, synthetic construct
  source 1..20: mol_type = other RNA
gcttcattaggtttcataaa

SEQ ID NO: 1280 - RNA, 20 nt, synthetic construct
  source 1..20: mol_type = other RNA
gcttcattttgctacaaaat

SEQ ID NO: 1281 - RNA, 20 nt, synthetic construct
  source 1..20: mol_type = other RNA
gcttgagaaatagatttttt

SEQ ID NO: 1282 - RNA, 20 nt, synthetic construct
  source 1..20: mol_type = other RNA
gcttgtcaggctgtttaaac

SEQ ID NO: 1283 - RNA, 20 nt, synthetic construct
  source 1..20: mol_type = other RNA
gctttctcttaaggatttaa

SEQ ID NO: 1284 - RNA, 20 nt, synthetic construct
  source 1..20: mol_type = other RNA
ggaaaccaaatagaggaagc

SEQ ID NO: 1285 - RNA, 20 nt, synthetic construct
  source 1..20: mol_type = other RNA
ggaaagttgtgatattagct

SEQ ID NO: 1286 - RNA, 20 nt, synthetic construct
  source 1..20: mol_type = other RNA
ggaaatataaactttaactc

SEQ ID NO: 1287 - RNA, 20 nt, synthetic construct
  source 1..20: mol_type = other RNA
ggaacaaaatatttacttag

SEQ ID NO: 1288 - RNA, 20 nt, synthetic construct
  source 1..20: mol_type = other RNA
ggaagagaggagccattttg

SEQ ID NO: 1289 - RNA, 20 nt, synthetic construct
  source 1..20: mol_type = other RNA
ggaagcaactcatatattaa

SEQ ID NO: 1290 - RNA, 20 nt, synthetic construct
  source 1..20: mol_type = other RNA
ggaatcaattttagatggtc

SEQ ID NO: 1291 - RNA, 20 nt, synthetic construct
  source 1..20: mol_type = other RNA
ggaatcttgtcagattacag

SEQ ID NO: 1292 - RNA, 20 nt, synthetic construct
  source 1..20: mol_type = other RNA
ggaatgaggttaatgtttaa

SEQ ID NO: 1293 - RNA, 20 nt, synthetic construct
  source 1..20: mol_type = other RNA
ggacaatttcaaatgcaaaa

SEQ ID NO: 1294 - RNA, 20 nt, synthetic construct
  source 1..20: mol_type = other RNA
ggaccacagactaagctgtc

SEQ ID NO: 1295 - RNA, 20 nt, synthetic construct
  source 1..20: mol_type = other RNA
ggactgggtctttgtttatt

SEQ ID NO: 1296 - RNA, 20 nt, synthetic construct
  source 1..20: mol_type = other RNA
ggactggtaattgtacagtt

SEQ ID NO: 1297 - RNA, 20 nt, synthetic construct
  source 1..20: mol_type = other RNA
ggagatgactactaagtcac

SEQ ID NO: 1298 - RNA, 20 nt, synthetic construct
  source 1..20: mol_type = other RNA
ggagccattttggtattctg

SEQ ID NO: 1299 - RNA, 20 nt, synthetic construct
  source 1..20: mol_type = other RNA
ggagtaaatgtttgatatga

SEQ ID NO: 1300 - RNA, 20 nt, synthetic construct
  source 1..20: mol_type = other RNA
ggataatttgaaatacataa

SEQ ID NO: 1301 - RNA, 20 nt, synthetic construct
  source 1..20: mol_type = other RNA
ggatatagtgcccaagttat

SEQ ID NO: 1302 - RNA, 20 nt, synthetic construct
  source 1..20: mol_type = other RNA
ggatctgttgtgatgtcgat

SEQ ID NO: 1303 - RNA, 20 nt, synthetic construct
  source 1..20: mol_type = other RNA
ggattcacatagatcataca

SEQ ID NO: 1304 - RNA, 20 nt, synthetic construct
  source 1..20: mol_type = other RNA
ggatttaataccagattatt

SEQ ID NO: 1305 - RNA, 20 nt, synthetic construct
  source 1..20: mol_type = other RNA
ggatttagggatctgttgtg

SEQ ID NO: 1306 - RNA, 20 nt, synthetic construct
  source 1..20: mol_type = other RNA
ggatttagggatttagggat

SEQ ID NO: 1307 - RNA, 20 nt, synthetic construct
  source 1..20: mol_type = other RNA
ggcaaatttaaaaggcaata

SEQ ID NO: 1308 - RNA, 20 nt, synthetic construct
  source 1..20: mol_type = other RNA
ggcaataatttaaacattaa

SEQ ID NO: 1309 - RNA, 20 nt, synthetic construct
  source 1..20: mol_type = other RNA
ggcactatatcctttaacaa

SEQ ID NO: 1310 - RNA, 20 nt, synthetic construct
  source 1..20: mol_type = other RNA
ggcagttttaaaaaatcata

SEQ ID NO: 1311 - RNA, 20 nt, synthetic construct
  source 1..20: mol_type = other RNA
ggcatcatatgagctaatat

SEQ ID NO: 1312 - RNA, 20 nt, synthetic construct
  source 1..20: mol_type = other RNA
ggcatcgagttaaagtttat

SEQ ID NO: 1313 - RNA, 20 nt, synthetic construct
  source 1..20: mol_type = other RNA
ggccagaataccaaaatggc

SEQ ID NO: 1314 - RNA, 20 nt, synthetic construct
  source 1..20: mol_type = other RNA
ggctcctctcttcccccaaa

SEQ ID NO: 1315 - RNA, 20 nt, synthetic construct
  source 1..20: mol_type = other RNA
ggctgtttaaacgttcagta

SEQ ID NO: 1316 - RNA, 20 nt, synthetic construct
  source 1..20: mol_type = other RNA
gggaaagttgtgatattagc

SEQ ID NO: 1317 - RNA, 20 nt, synthetic construct
  source 1..20: mol_type = other RNA
gggaaatataaactttaact

SEQ ID NO: 1318 - RNA, 20 nt, synthetic construct
  source 1..20: mol_type = other RNA
gggaagagaggagccatttt

SEQ ID NO: 1319 - RNA, 20 nt, synthetic construct
  source 1..20: mol_type = other RNA
gggaatcaattttagatggt

SEQ ID NO: 1320 - RNA, 20 nt, synthetic construct
  source 1..20: mol_type = other RNA
gggactgggtctttgtttat

SEQ ID NO: 1321 - RNA, 20 nt, synthetic construct
  source 1..20: mol_type = other RNA
gggatctgttgtgatgtcga

SEQ ID NO: 1322 - RNA, 20 nt, synthetic construct
  source 1..20: mol_type = other RNA
gggatttagggatctgttgt

SEQ ID NO: 1323 - RNA, 20 nt, synthetic construct
  source 1..20: mol_type = other RNA
gggatttagggatttaggga

SEQ ID NO: 1324 - RNA, 20 nt, synthetic construct
  source 1..20: mol_type = other RNA
gggcactatatcctttaaca

SEQ ID NO: 1325 - RNA, 20 nt, synthetic construct
  source 1..20: mol_type = other RNA
gggccagaataccaaaatgg

SEQ ID NO: 1326 - RNA, 20 nt, synthetic construct
  source 1..20: mol_type = other RNA
ggggaaatataaactttaac

SEQ ID NO: 1327 - RNA, 20 nt, synthetic construct
  source 1..20: mol_type = other RNA
ggggaagagaggagccattt

SEQ ID NO: 1328 - RNA, 20 nt, synthetic construct
  source 1..20: mol_type = other RNA
gggggaagagaggagccatt

SEQ ID NO: 1329 - RNA, 20 nt, synthetic construct
  source 1..20: mol_type = other RNA
gggtctttgtttattgaatt

SEQ ID NO: 1330 - RNA, 20 nt, synthetic construct
  source 1..20: mol_type = other RNA
gggtttaatttaaaatttct

SEQ ID NO: 1331 - RNA, 20 nt, synthetic construct
  source 1..20: mol_type = other RNA
ggtaaaaaatttgtatctaa

SEQ ID NO: 1332 - RNA, 20 nt, synthetic construct
  source 1..20: mol_type = other RNA
ggtaattgtacagttcttaa

SEQ ID NO: 1333 - RNA, 20 nt, synthetic construct
  source 1..20: mol_type = other RNA
ggtaggtcaccatataactt

SEQ ID NO: 1334 - RNA, 20 nt, synthetic construct
  source 1..20: mol_type = other RNA
ggtatagtgatacctcatgt

SEQ ID NO: 1335 - RNA, 20 nt, synthetic construct
  source 1..20: mol_type = other RNA
ggtatcactataccttattt

SEQ ID NO: 1336 - RNA, 20 nt, synthetic construct
  source 1..20: mol_type = other RNA
ggtattaaatccttaagaga

SEQ ID NO: 1337 - RNA, 20 nt, synthetic construct
  source 1..20: mol_type = other RNA
ggtattctggccctaaaaaa

SEQ ID NO: 1338 - RNA, 20 nt, synthetic construct
  source 1..20: mol_type = other RNA
ggtattctttaaggttatgt

SEQ ID NO: 1339 - RNA, 20 nt, synthetic construct
  source 1..20: mol_type = other RNA
ggtcacaatctagattataa

SEQ ID NO: 1340 - RNA, 20 nt, synthetic construct
  source 1..20: mol_type = other RNA
ggtcaccatataacttgggc

SEQ ID NO: 1341 - RNA, 20 nt, synthetic construct
  source 1..20: mol_type = other RNA
ggtcctgaaaattatagatt

SEQ ID NO: 1342 - RNA, 20 nt, synthetic construct
  source 1..20: mol_type = other RNA
ggtctaataatctggtatta

SEQ ID NO: 1343 - RNA, 20 nt, synthetic construct
  source 1..20: mol_type = other RNA
ggtctttgtttattgaattt

SEQ ID NO: 1344 - RNA, 20 nt, synthetic construct
  source 1..20: mol_type = other RNA
ggtgaacttattaaataact

SEQ ID NO: 1345 - RNA, 20 nt, synthetic construct
  source 1..20: mol_type = other RNA
ggtgacctacctttgtcaat

SEQ ID NO: 1346 - RNA, 20 nt, synthetic construct
  source 1..20: mol_type = other RNA
ggttaatgtttaaattattg

SEQ ID NO: 1347 - RNA, 20 nt, synthetic construct
  source 1..20: mol_type = other RNA
ggttatgtgattgtatgttt

SEQ ID NO: 1348 - RNA, 20 nt, synthetic construct
  source 1..20: mol_type = other RNA
ggtttatttctacttgaaaa

SEQ ID NO: 1349 - RNA, 20 nt, synthetic construct
  source 1..20: mol_type = other RNA
ggtttcataaataaatcata

SEQ ID NO: 1350 - RNA, 20 nt, synthetic construct
  source 1..20: mol_type = other RNA
ggttttcaagtagaaataaa

SEQ ID NO: 1351 - RNA, 20 nt, synthetic construct
  source 1..20: mol_type = other RNA
gtaaaaatctgtaatacaaa

SEQ ID NO: 1352 - RNA, 20 nt, synthetic construct
  source 1..20: mol_type = other RNA
gtaaacggtattctttaagg

SEQ ID NO: 1353 - RNA, 20 nt, synthetic construct
  source 1..20: mol_type = other RNA
gtaaaggaatcttgtcagat

SEQ ID NO: 1354 - RNA, 20 nt, synthetic construct
  source 1..20: mol_type = other RNA
gtaaatattttgttccagaa

SEQ ID NO: 1355 - RNA, 20 nt, synthetic construct
  source 1..20: mol_type = other RNA
gtaaatgtttgatatgattt

SEQ ID NO: 1356 - RNA, 20 nt, synthetic construct
  source 1..20: mol_type = other RNA
gtaacaagttactgaacgtt

SEQ ID NO: 1357 - RNA, 20 nt, synthetic construct
  source 1..20: mol_type = other RNA
gtaacttgttacgaggttta

SEQ ID NO: 1358 - RNA, 20 nt, synthetic construct
  source 1..20: mol_type = other RNA
gtaagaatgaacatatttgt

SEQ ID NO: 1359 - RNA, 20 nt, synthetic construct
  source 1..20: mol_type = other RNA
gtaatctgacaagattcctt

SEQ ID NO: 1360 - RNA, 20 nt, synthetic construct
  source 1..20: mol_type = other RNA
gtaattgtacagttcttaaa

SEQ ID NO: 1361 - RNA, 20 nt, synthetic construct
  source 1..20: mol_type = other RNA
gtacaaaataataaaggtaa

SEQ ID NO: 1362 - RNA, 20 nt, synthetic construct
  source 1..20: mol_type = other RNA
gtacaattaccagtcctctg

SEQ ID NO: 1363 - RNA, 20 nt, synthetic construct
  source 1..20: mol_type = other RNA
gtacagttcttaaatgttgt

SEQ ID NO: 1364 - RNA, 20 nt, synthetic construct
  source 1..20: mol_type = other RNA
gtactagttttttaaactgg

SEQ ID NO: 1365 - RNA, 20 nt, synthetic construct
  source 1..20: mol_type = other RNA
gtactcttgttaaaactcta

SEQ ID NO: 1366 - RNA, 20 nt, synthetic construct
  source 1..20: mol_type = other RNA
gtacttttctggaacaaaat

SEQ ID NO: 1367 - RNA, 20 nt, synthetic construct
  source 1..20: mol_type = other RNA
gtagaaataaacctcgtaac

SEQ ID NO: 1368 - RNA, 20 nt, synthetic construct
  source 1..20: mol_type = other RNA
gtagcaaaatgaagcatcag

SEQ ID NO: 1369 - RNA, 20 nt, synthetic construct
  source 1..20: mol_type = other RNA
gtaggtcaccatataacttg

SEQ ID NO: 1370 - RNA, 20 nt, synthetic construct
  source 1..20: mol_type = other RNA
gtaggttttcaagtagaaat

SEQ ID NO: 1371 - RNA, 20 nt, synthetic construct
  source 1..20: mol_type = other RNA
gtagtattaatttcaaaact

SEQ ID NO: 1372 - RNA, 20 nt, synthetic construct
  source 1..20: mol_type = other RNA
gtagtcatctccatttgttt

SEQ ID NO: 1373 - RNA, 20 nt, synthetic construct
  source 1..20: mol_type = other RNA
gtatagtgatacctcatgtt

SEQ ID NO: 1374 - RNA, 20 nt, synthetic construct
  source 1..20: mol_type = other RNA
gtatattggataatttgaaa

SEQ ID NO: 1375 - RNA, 20 nt, synthetic construct
  source 1..20: mol_type = other RNA
gtatcactataccttatttg

SEQ ID NO: 1376 - RNA, 20 nt, synthetic construct
  source 1..20: mol_type = other RNA
gtatcacttgtcagaattta

SEQ ID NO: 1377 - RNA, 20 nt, synthetic construct
  source 1..20: mol_type = other RNA
gtatctaatctttagggatt

SEQ ID NO: 1378 - RNA, 20 nt, synthetic construct
  source 1..20: mol_type = other RNA
gtatgatctatgtgaatcct

SEQ ID NO: 1379 - RNA, 20 nt, synthetic construct
  source 1..20: mol_type = other RNA
gtatgtgtaaaaatctgtaa

SEQ ID NO: 1380 - RNA, 20 nt, synthetic construct
  source 1..20: mol_type = other RNA
gtatgtttaatcttaaatag

SEQ ID NO: 1381 - RNA, 20 nt, synthetic construct
  source 1..20: mol_type = other RNA
gtattaaaataagttcgctg

SEQ ID NO: 1382 - RNA, 20 nt, synthetic construct
  source 1..20: mol_type = other RNA
gtattaaatccttaagagaa

SEQ ID NO: 1383 - RNA, 20 nt, synthetic construct
  source 1..20: mol_type = other RNA
gtattacagatttttacaca

SEQ ID NO: 1384 - RNA, 20 nt, synthetic construct
  source 1..20: mol_type = other RNA
gtattagaatcacagcatat

SEQ ID NO: 1385 - RNA, 20 nt, synthetic construct
  source 1..20: mol_type = other RNA
gtattctttaaggttatgtg

SEQ ID NO: 1386 - RNA, 20 nt, synthetic construct
  source 1..20: mol_type = other RNA
gtattgacaaaggtaggtca

SEQ ID NO: 1387 - RNA, 20 nt, synthetic construct
  source 1..20: mol_type = other RNA
gtatttaattctgcttcatt

SEQ ID NO: 1388 - RNA, 20 nt, synthetic construct
  source 1..20: mol_type = other RNA
gtatttagtcaagtttagag

SEQ ID NO: 1389 - RNA, 20 nt, synthetic construct
  source 1..20: mol_type = other RNA
gtatttcaaattatccaata

SEQ ID NO: 1390 - RNA, 20 nt, synthetic construct
  source 1..20: mol_type = other RNA
gtcaagtttagagttttaac

SEQ ID NO: 1391 - RNA, 20 nt, synthetic construct
  source 1..20: mol_type = other RNA
gtcaatacttagcattatgt

SEQ ID NO: 1392 - RNA, 20 nt, synthetic construct
  source 1..20: mol_type = other RNA
gtcaatgtgacttagtagtc

SEQ ID NO: 1393 - RNA, 20 nt, synthetic construct
  source 1..20: mol_type = other RNA
gtcacaatctagattataat

SEQ ID NO: 1394 - RNA, 20 nt, synthetic construct
  source 1..20: mol_type = other RNA
gtcacatatataaaagatat

SEQ ID NO: 1395 - RNA, 20 nt, synthetic construct
  source 1..20: mol_type = other RNA
gtcacattgactttaacatg

SEQ ID NO: 1396 - RNA, 20 nt, synthetic construct
  source 1..20: mol_type = other RNA
gtcaccatataacttgggca

SEQ ID NO: 1397 - RNA, 20 nt, synthetic construct
  source 1..20: mol_type = other RNA
gtcactgtctatttaagatt

SEQ ID NO: 1398 - RNA, 20 nt, synthetic construct
  source 1..20: mol_type = other RNA
gtcagattacagtaagaatg

SEQ ID NO: 1399 - RNA, 20 nt, synthetic construct
  source 1..20: mol_type = other RNA
gtcagcacagagtatgtgta

SEQ ID NO: 1400 - RNA, 20 nt, synthetic construct
  source 1..20: mol_type = other RNA
gtcaggctgtttaaacgttc

SEQ ID NO: 1401 - RNA, 20 nt, synthetic construct
  source 1..20: mol_type = other RNA
gtcatctccatttgtttaaa

SEQ ID NO: 1402 - RNA, 20 nt, synthetic construct
  source 1..20: mol_type = other RNA
gtccaattttgggggaagag

SEQ ID NO: 1403 - RNA, 20 nt, synthetic construct
  source 1..20: mol_type = other RNA
gtccctaaattatagaaatt

SEQ ID NO: 1404 - RNA, 20 nt, synthetic construct
  source 1..20: mol_type = other RNA
gtcctctgtatttagtcaag

SEQ ID NO: 1405 - RNA, 20 nt, synthetic construct
  source 1..20: mol_type = other RNA
gtcctgaaaattatagatta

SEQ ID NO: 1406 - RNA, 20 nt, synthetic construct
  source 1..20: mol_type = other RNA
gtcgaaattaacgctgattt

SEQ ID NO: 1407 - RNA, 20 nt, synthetic construct
  source 1..20: mol_type = other RNA
gtcgataaacatgcaagaat

SEQ ID NO: 1408 - RNA, 20 nt, synthetic construct
  source 1..20: mol_type = other RNA
gtctaataatctggtattaa

SEQ ID NO: 1409 - RNA, 20 nt, synthetic construct
  source 1..20: mol_type = other RNA
gtctatttaagattaaacat

SEQ ID NO: 1410 - RNA, 20 nt, synthetic construct
  source 1..20: mol_type = other RNA
gtctgtggtcctgaaaatta

SEQ ID NO: 1411 - RNA, 20 nt, synthetic construct
  source 1..20: mol_type = other RNA
gtctttaaacaaatggagat

SEQ ID NO: 1412 - RNA, 20 nt, synthetic construct
  source 1..20: mol_type = other RNA
gtctttgtttattgaatttt

SEQ ID NO: 1413 - RNA, 20 nt, synthetic construct
  source 1..20: mol_type = other RNA
gtgaacttattaaataactt

SEQ ID NO: 1414 - RNA, 20 nt, synthetic construct
  source 1..20: mol_type = other RNA
gtgaatcctaagtaaatatt

SEQ ID NO: 1415 - RNA, 20 nt, synthetic construct
  source 1..20: mol_type = other RNA
gtgaccatctaaaattgatt

SEQ ID NO: 1416 - RNA, 20 nt, synthetic construct
  source 1..20: mol_type = other RNA
gtgacctacctttgtcaata

SEQ ID NO: 1417 - RNA, 20 nt, synthetic construct
  source 1..20: mol_type = other RNA
gtgacttagtagtcatctcc

SEQ ID NO: 1418 - RNA, 20 nt, synthetic construct
  source 1..20: mol_type = other RNA
gtgatacctcatgttaaagt

SEQ ID NO: 1419 - RNA, 20 nt, synthetic construct
  source 1..20: mol_type = other RNA
gtgatactgtggtaaaaaat

SEQ ID NO: 1420 - RNA, 20 nt, synthetic construct
  source 1..20: mol_type = other RNA
gtgatattagctcatatgat

SEQ ID NO: 1421 - RNA, 20 nt, synthetic construct
  source 1..20: mol_type = other RNA
gtgatgtcgataaacatgca

SEQ ID NO: 1422 - RNA, 20 nt, synthetic construct
  source 1..20: mol_type = other RNA
gtgatgtgggaatcaatttt

SEQ ID NO: 1423 - RNA, 20 nt, synthetic construct
  source 1..20: mol_type = other RNA
gtgattctaatacattcgtg

SEQ ID NO: 1424 - RNA, 20 nt, synthetic construct
  source 1..20: mol_type = other RNA
gtgattgtatgtttaatctt

SEQ ID NO: 1425 - RNA, 20 nt, synthetic construct
  source 1..20: mol_type = other RNA
gtgcccaagttatatggtga

SEQ ID NO: 1426 - RNA, 20 nt, synthetic construct
  source 1..20: mol_type = other RNA
gtgctgacgatttttagttt

SEQ ID NO: 1427 - RNA, 20 nt, synthetic construct
  source 1..20: mol_type = other RNA
gtggcatcgagttaaagttt

SEQ ID NO: 1428 - RNA, 20 nt, synthetic construct
  source 1..20: mol_type = other RNA
gtgggaatcaattttagatg

SEQ ID NO: 1429 - RNA, 20 nt, synthetic construct
  source 1..20: mol_type = other RNA
gtggtaaaaaatttgtatct

SEQ ID NO: 1430 - RNA, 20 nt, synthetic construct
  source 1..20: mol_type = other RNA
gtggtcctgaaaattataga

SEQ ID NO: 1431 - RNA, 20 nt, synthetic construct
  source 1..20: mol_type = other RNA
gtggtctaataatctggtat

SEQ ID NO: 1432 - RNA, 20 nt, synthetic construct
  source 1..20: mol_type = other RNA
gtgtaaaaatctgtaataca

SEQ ID NO: 1433 - RNA, 20 nt, synthetic construct
  source 1..20: mol_type = other RNA
gtgtaggttttcaagtagaa

SEQ ID NO: 1434 - RNA, 20 nt, synthetic construct
  source 1..20: mol_type = other RNA
gttaaaactctaaacttgac

SEQ ID NO: 1435 - RNA, 20 nt, synthetic construct
  source 1..20: mol_type = other RNA
gttaaaggatatagtgccca

SEQ ID NO: 1436 - RNA, 20 nt, synthetic construct
  source 1..20: mol_type = other RNA
gttaaagtcaatgtgactta

SEQ ID NO: 1437 - RNA, 20 nt, synthetic construct
  source 1..20: mol_type = other RNA
gttaaagtttatatttcccc

SEQ ID NO: 1438 - RNA, 20 nt, synthetic construct
  source 1..20: mol_type = other RNA
gttaatgtggtctaataatc

SEQ ID NO: 1439 - RNA, 20 nt, synthetic construct
  source 1..20: mol_type = other RNA
gttaatgtttaaattattgc

SEQ ID NO: 1440 - RNA, 20 nt, synthetic construct
  source 1..20: mol_type = other RNA
gttaatttcgacagcttagt

SEQ ID NO: 1441 - RNA, 20 nt, synthetic construct
  source 1..20: mol_type = other RNA
gttacgaggtttatttctac

SEQ ID NO: 1442 - RNA, 20 nt, synthetic construct
  source 1..20: mol_type = other RNA
gttactgaacgtttaaacag

SEQ ID NO: 1443 - RNA, 20 nt, synthetic construct
  source 1..20: mol_type = other RNA
gttatatggtgacctacctt

SEQ ID NO: 1444 - RNA, 20 nt, synthetic construct
  source 1..20: mol_type = other RNA
gttatgtgattgtatgttta

SEQ ID NO: 1445 - RNA, 20 nt, synthetic construct
  source 1..20: mol_type = other RNA
gttatttaataagttcacct

SEQ ID NO: 1446 - RNA, 20 nt, synthetic construct
  source 1..20: mol_type = other RNA
gttcacctattgattataat

SEQ ID NO: 1447 - RNA, 20 nt, synthetic construct
  source 1..20: mol_type = other RNA
gttcagtaacttgttacgag

SEQ ID NO: 1448 - RNA, 20 nt, synthetic construct
  source 1..20: mol_type = other RNA
gttcattcttactgtaatct

SEQ ID NO: 1449 - RNA, 20 nt, synthetic construct
  source 1..20: mol_type = other RNA
gttccagaaaagtacaaaat

SEQ ID NO: 1450 - RNA, 20 nt, synthetic construct
  source 1..20: mol_type = other RNA
gttcgctgtctttaaacaaa

SEQ ID NO: 1451 - RNA, 20 nt, synthetic construct
  source 1..20: mol_type = other RNA
gttcttaaatgttgtagtat

SEQ ID NO: 1452 - RNA, 20 nt, synthetic construct
  source 1..20: mol_type = other RNA
gttgtagtattaatttcaaa

SEQ ID NO: 1453 - RNA, 20 nt, synthetic construct
  source 1..20: mol_type = other RNA
gttgtgatattagctcatat

SEQ ID NO: 1454 - RNA, 20 nt, synthetic construct
  source 1..20: mol_type = other RNA
gttgtgatgtcgataaacat

SEQ ID NO: 1455 - RNA, 20 nt, synthetic construct
  source 1..20: mol_type = other RNA
gtttaaaaaactagtactct

SEQ ID NO: 1456 - RNA, 20 nt, synthetic construct
  source 1..20: mol_type = other RNA
gtttaaacagcctgacaagc

SEQ ID NO: 1457 - RNA, 20 nt, synthetic construct
  source 1..20: mol_type = other RNA
gtttaaacgttcagtaactt

SEQ ID NO: 1458 - RNA, 20 nt, synthetic construct
  source 1..20: mol_type = other RNA
gtttaaagacagcgaactta

SEQ ID NO: 1459 - RNA, 20 nt, synthetic construct
  source 1..20: mol_type = other RNA
gtttaaattattgcctttta

SEQ ID NO: 1460 - RNA, 20 nt, synthetic construct
  source 1..20: mol_type = other RNA
gtttaatcttaaatagacag

SEQ ID NO: 1461 - RNA, 20 nt, synthetic construct
  source 1..20: mol_type = other RNA
gtttacatttctcaatcaaa

SEQ ID NO: 1462 - RNA, 20 nt, synthetic construct
  source 1..20: mol_type = other RNA
gtttagagttttaacaagag

SEQ ID NO: 1463 - RNA, 20 nt, synthetic construct
  source 1..20: mol_type = other RNA
gtttatatttcccctaaata

SEQ ID NO: 1464 - RNA, 20 nt, synthetic construct
  source 1..20: mol_type = other RNA
gtttatcgacatcacaacag

SEQ ID NO: 1465 - RNA, 20 nt, synthetic construct
  source 1..20: mol_type = other RNA
gtttatttctacttgaaaac

SEQ ID NO: 1466 - RNA, 20 nt, synthetic construct
  source 1..20: mol_type = other RNA
gttttaaattttgtgatgtg

SEQ ID NO: 1467 - RNA, 20 nt, synthetic construct
  source 1..20: mol_type = other RNA
gttttaacaagagtactagt

SEQ ID NO: 1468 - RNA, 20 nt, synthetic construct
  source 1..20: mol_type = other RNA
gttttcaagtagaaataaac

SEQ ID NO: 1469 - RNA, 20 nt, synthetic construct
  source 1..20: mol_type = other RNA
gttttcatagtattaagtgt

SEQ ID NO: 1470 - RNA, 20 nt, synthetic construct
  source 1..20: mol_type = other RNA
gttttgaaattaatactaca

SEQ ID NO: 1471 - RNA, 20 nt, synthetic construct
  source 1..20: mol_type = other RNA
gttttttaaactgggaaagt

SEQ ID NO: 1472 - RNA, 20 nt, synthetic construct
  source 1..20: mol_type = other RNA
taaaaaactagtactcttgt

SEQ ID NO: 1473 - RNA, 20 nt, synthetic construct
  source 1..20: mol_type = other RNA
taaaaataaattctgacaag

SEQ ID NO: 1474 - RNA, 20 nt, synthetic construct
  source 1..20: mol_type = other RNA
taaaaatcgtcagcacagag

SEQ ID NO: 1475 - RNA, 20 nt, synthetic construct
  source 1..20: mol_type = other RNA
taaaactctaaacttgacta

SEQ ID NO: 1476 - RNA, 20 nt, synthetic construct
  source 1..20: mol_type = other RNA
taaaactgccagtaagaaat

SEQ ID NO: 1477 - RNA, 20 nt, synthetic construct
  source 1..20: mol_type = other RNA
taaaagatatgtatgatcta

SEQ ID NO: 1478 - RNA, 20 nt, synthetic construct
  source 1..20: mol_type = other RNA
taaaaggcaataatttaaac

SEQ ID NO: 1479 - RNA, 20 nt, synthetic construct
  source 1..20: mol_type = other RNA
taaaaggcatcatatgagct

SEQ ID NO: 1480 - RNA, 20 nt, synthetic construct
  source 1..20: mol_type = other RNA
taaaataagttcgctgtctt

SEQ ID NO: 1481 - RNA, 20 nt, synthetic construct
  source 1..20: mol_type = other RNA
taaaattgattcccacatca

SEQ ID NO: 1482 - RNA, 20 nt, synthetic construct
  source 1..20: mol_type = other RNA
taaaatttcttactggcagt

SEQ ID NO: 1483 - RNA, 20 nt, synthetic construct
  source 1..20: mol_type = other RNA
taaacaaagacccagtccct

SEQ ID NO: 1484 - RNA, 20 nt, synthetic construct
  source 1..20: mol_type = other RNA
taaacaaatggagatgacta

SEQ ID NO: 1485 - RNA, 20 nt, synthetic construct
  source 1..20: mol_type = other RNA
taaacagcctgacaagcatg

SEQ ID NO: 1486 - RNA, 20 nt, synthetic construct
  source 1..20: mol_type = other RNA
taaacatacaatcacataac

SEQ ID NO: 1487 - RNA, 20 nt, synthetic construct
  source 1..20: mol_type = other RNA
taaacatatatacatgcttg

SEQ ID NO: 1488 - RNA, 20 nt, synthetic construct
  source 1..20: mol_type = other RNA
taaacatgcaagaataattt

SEQ ID NO: 1489 - RNA, 20 nt, synthetic construct
  source 1..20: mol_type = other RNA
taaacattaacctcattcca

SEQ ID NO: 1490 - RNA, 20 nt, synthetic construct
  source 1..20: mol_type = other RNA
taaacccatttgttaaagga

SEQ ID NO: 1491 - RNA, 20 nt, synthetic construct
  source 1..20: mol_type = other RNA
taaacctcgtaacaagttac

SEQ ID NO: 1492 - RNA, 20 nt, synthetic construct
  source 1..20: mol_type = other RNA
taaacggtattctttaaggt

SEQ ID NO: 1493 - RNA, 20 nt, synthetic construct
  source 1..20: mol_type = other RNA
taaacgttcagtaacttgtt

SEQ ID NO: 1494 - RNA, 20 nt, synthetic construct
  source 1..20: mol_type = other RNA
taaactgatgcttcattttg

SEQ ID NO: 1495 - RNA, 20 nt, synthetic construct
  source 1..20: mol_type = other RNA
taaactgggaaagttgtgat

SEQ ID NO: 1496 - RNA, 20 nt, synthetic construct
  source 1..20: mol_type = other RNA
taaacttgactaaatacaga

SEQ ID NO: 1497 - RNA, 20 nt, synthetic construct
  source 1..20: mol_type = other RNA
taaactttaactcgatgcca

SEQ ID NO: 1498 - RNA, 20 nt, synthetic construct
  source 1..20: mol_type = other RNA
taaagaataccgtttacatt

SEQ ID NO: 1499 - RNA, 20 nt, synthetic construct
  source 1..20: mol_type = other RNA
taaagacagcgaacttattt

SEQ ID NO: 1500 - RNA, 20 nt, synthetic construct
  source 1..20: mol_type = other RNA
taaaggaatcttgtcagatt

SEQ ID NO: 1501 - RNA, 20 nt, synthetic construct
  source 1..20: mol_type = other RNA
taaaggatatagtgcccaag

SEQ ID NO: 1502 - RNA, 20 nt, synthetic construct
  source 1..20: mol_type = other RNA
taaagtcaatgtgacttagt

SEQ ID NO: 1503 - RNA, 20 nt, synthetic construct
  source 1..20: mol_type = other RNA
taaagtcactgtctatttaa

SEQ ID NO: 1504 - RNA, 20 nt, synthetic construct
  source 1..20: mol_type = other RNA
taaagtttatatttccccta

SEQ ID NO: 1505 - RNA, 20 nt, synthetic construct
  source 1..20: mol_type = other RNA
taaatacagaggactggtaa

SEQ ID NO: 1506 - RNA, 20 nt, synthetic construct
  source 1..20: mol_type = other RNA
taaatagacagtgactttaa

SEQ ID NO: 1507 - RNA, 20 nt, synthetic construct
  source 1..20: mol_type = other RNA
taaatatgctgtgattctaa

SEQ ID NO: 1508 - RNA, 20 nt, synthetic construct
  source 1..20: mol_type = other RNA
taaatattttgttccagaaa

SEQ ID NO: 1509 - RNA, 20 nt, synthetic construct
  source 1..20: mol_type = other RNA
taaatccctaaagattagat

SEQ ID NO: 1510 - RNA, 20 nt, synthetic construct
  source 1..20: mol_type = other RNA
taaatccctaaatccctaaa

SEQ ID NO: 1511 - RNA, 20 nt, synthetic construct
  source 1..20: mol_type = other RNA
taaatccttaagagaaagct

SEQ ID NO: 1512 - RNA, 20 nt, synthetic construct
  source 1..20: mol_type = other RNA
taaattaaacccatttgtta

SEQ ID NO: 1513 - RNA, 20 nt, synthetic construct
  source 1..20: mol_type = other RNA
taaattattcttgcatgttt

SEQ ID NO: 1514 - RNA, 20 nt, synthetic construct
  source 1..20: mol_type = other RNA
taaattctgacaagtgatac

SEQ ID NO: 1515 - RNA, 20 nt, synthetic construct
  source 1..20: mol_type = other RNA
taaatttctataatttaggg

SEQ ID NO: 1516 - RNA, 20 nt, synthetic construct
  source 1..20: mol_type = other RNA
taaattttgtgatgtgggaa

SEQ ID NO: 1517 - RNA, 20 nt, synthetic construct
  source 1..20: mol_type = other RNA
taacaaataaggtatagtga

SEQ ID NO: 1518 - RNA, 20 nt, synthetic construct
  source 1..20: mol_type = other RNA
taacaaatgggtttaattta

SEQ ID NO: 1519 - RNA, 20 nt, synthetic construct
  source 1..20: mol_type = other RNA
taacaagagtactagttttt

SEQ ID NO: 1520 - RNA, 20 nt, synthetic construct
  source 1..20: mol_type = other RNA
taacaagttactgaacgttt

SEQ ID NO: 1521 - RNA, 20 nt, synthetic construct
  source 1..20: mol_type = other RNA
taacacttaatactatgaaa

SEQ ID NO: 1522 - RNA, 20 nt, synthetic construct
  source 1..20: mol_type = other RNA
taacatgaggtatcactata

SEQ ID NO: 1523 - RNA, 20 nt, synthetic construct
  source 1..20: mol_type = other RNA
taacctcattccaagttaat

SEQ ID NO: 1524 - RNA, 20 nt, synthetic construct
  source 1..20: mol_type = other RNA
taaccttaaagaataccgtt

SEQ ID NO: 1525 - RNA, 20 nt, synthetic construct
  source 1..20: mol_type = other RNA
taactcgatgccacaaatat

SEQ ID NO: 1526 - RNA, 20 nt, synthetic construct
  source 1..20: mol_type = other RNA
taacttggaatgaggttaat

SEQ ID NO: 1527 - RNA, 20 nt, synthetic construct
  source 1..20: mol_type = other RNA
taacttgggcactatatcct

SEQ ID NO: 1528 - RNA, 20 nt, synthetic construct
  source 1..20: mol_type = other RNA
taacttgttacgaggtttat

SEQ ID NO: 1529 - RNA, 20 nt, synthetic construct
  source 1..20: mol_type = other RNA
taagaactgtacaattacca

SEQ ID NO: 1530 - RNA, 20 nt, synthetic construct
  source 1..20: mol_type = other RNA
taagaatgaacatatttgtg

SEQ ID NO: 1531 - RNA, 20 nt, synthetic construct
  source 1..20: mol_type = other RNA
taagaattttgattgagaaa

SEQ ID NO: 1532 - RNA, 20 nt, synthetic construct
  source 1..20: mol_type = other RNA
taagagaaagcttgagaaat

SEQ ID NO: 1533 - RNA, 20 nt, synthetic construct
  source 1..20: mol_type = other RNA
taagattaaacatacaatca

SEQ ID NO: 1534 - RNA, 20 nt, synthetic construct
  source 1..20: mol_type = other RNA
taagctgtcgaaattaacgc

SEQ ID NO: 1535 - RNA, 20 nt, synthetic construct
  source 1..20: mol_type = other RNA
taaggatttaataccagatt

SEQ ID NO: 1536 - RNA, 20 nt, synthetic construct
  source 1..20: mol_type = other RNA
taaggtatagtgatacctca

SEQ ID NO: 1537 - RNA, 20 nt, synthetic construct
  source 1..20: mol_type = other RNA
taaggttatgtgattgtatg

SEQ ID NO: 1538 - RNA, 20 nt, synthetic construct
  source 1..20: mol_type = other RNA
taagtaaatattttgttcca

SEQ ID NO: 1539 - RNA, 20 nt, synthetic construct
  source 1..20: mol_type = other RNA
taagtattgacaaaggtagg

SEQ ID NO: 1540 - RNA, 20 nt, synthetic construct
  source 1..20: mol_type = other RNA
taagtcacattgactttaac

SEQ ID NO: 1541 - RNA, 20 nt, synthetic construct
  source 1..20: mol_type = other RNA
taagttcacctattgattat

SEQ ID NO: 1542 - RNA, 20 nt, synthetic construct
  source 1..20: mol_type = other RNA
taagttcgctgtctttaaac

SEQ ID NO: 1543 - RNA, 20 nt, synthetic construct
  source 1..20: mol_type = other RNA
taataagttcacctattgat

SEQ ID NO: 1544 - RNA, 20 nt, synthetic construct
  source 1..20: mol_type = other RNA
taataatctggtattaaatc

SEQ ID NO: 1545 - RNA, 20 nt, synthetic construct
  source 1..20: mol_type = other RNA
taatacagtatttaattctg

SEQ ID NO: 1546 - RNA, 20 nt, synthetic construct
  source 1..20: mol_type = other RNA
taatacattcgtgtaggttt

SEQ ID NO: 1547 - RNA, 20 nt, synthetic construct
  source 1..20: mol_type = other RNA
taataccagattattagacc

SEQ ID NO: 1548 - RNA, 20 nt, synthetic construct
  source 1..20: mol_type = other RNA
taatactacaacatttaaga

SEQ ID NO: 1549 - RNA, 20 nt, synthetic construct
  source 1..20: mol_type = other RNA
taatatatgagttgcttcct

SEQ ID NO: 1550 - RNA, 20 nt, synthetic construct
  source 1..20: mol_type = other RNA
taatatcacaactttcccag

SEQ ID NO: 1551 - RNA, 20 nt, synthetic construct
  source 1..20: mol_type = other RNA
taatcaataggtgaacttat

SEQ ID NO: 1552 - RNA, 20 nt, synthetic construct
  source 1..20: mol_type = other RNA
taatctagattgtgaccatc

SEQ ID NO: 1553 - RNA, 20 nt, synthetic construct
  source 1..20: mol_type = other RNA
taatctataattttcaggac

SEQ ID NO: 1554 - RNA, 20 nt, synthetic construct
  source 1..20: mol_type = other RNA
taatctgacaagattccttt

SEQ ID NO: 1555 - RNA, 20 nt, synthetic construct
  source 1..20: mol_type = other RNA
taatctggtattaaatcctt

SEQ ID NO: 1556 - RNA, 20 nt, synthetic construct
  source 1..20: mol_type = other RNA
taatcttaaatagacagtga

SEQ ID NO: 1557 - RNA, 20 nt, synthetic construct
  source 1..20: mol_type = other RNA
taatctttagggatttaggg

SEQ ID NO: 1558 - RNA, 20 nt, synthetic construct
  source 1..20: mol_type = other RNA
taatgaagcagaattaaata

SEQ ID NO: 1559 - RNA, 20 nt, synthetic construct
  source 1..20: mol_type = other RNA
taatgctaagtattgacaaa

SEQ ID NO: 1560 - RNA, 20 nt, synthetic construct
  source 1..20: mol_type = other RNA
taatgtggtctaataatctg

SEQ ID NO: 1561 - RNA, 20 nt, synthetic construct
  source 1..20: mol_type = other RNA
taatgtttaaattattgcct

SEQ ID NO: 1562 - RNA, 20 nt, synthetic construct
  source 1..20: mol_type = other RNA
taattctgcttcattaggtt

SEQ ID NO: 1563 - RNA, 20 nt, synthetic construct
  source 1..20: mol_type = other RNA
taattgtaaaggaatcttgt

SEQ ID NO: 1564 - RNA, 20 nt, synthetic construct
  source 1..20: mol_type = other RNA
taattgtacagttcttaaat

SEQ ID NO: 1565 - RNA, 20 nt, synthetic construct
  source 1..20: mol_type = other RNA
taatttaaacattaacctca

SEQ ID NO: 1566 - RNA, 20 nt, synthetic construct
  source 1..20: mol_type = other RNA
taatttagggactgggtctt

SEQ ID NO: 1567 - RNA, 20 nt, synthetic construct
  source 1..20: mol_type = other RNA
taatttcgacagcttagtct

SEQ ID NO: 1568 - RNA, 20 nt, synthetic construct
  source 1..20: mol_type = other RNA
taatttgaaatacataatgc

SEQ ID NO: 1569 - RNA, 20 nt, synthetic construct
  source 1..20: mol_type = other RNA
taatttggagtaaatgtttg

SEQ ID NO: 1570 - RNA, 20 nt, synthetic construct
  source 1..20: mol_type = other RNA
taattttcaggaccacagac

SEQ ID NO: 1571 - RNA, 20 nt, synthetic construct
  source 1..20: mol_type = other RNA
tacaaaataatttggagtaa

SEQ ID NO: 1572 - RNA, 20 nt, synthetic construct
  source 1..20: mol_type = other RNA
tacaaatttttaaactgatg

SEQ ID NO: 1573 - RNA, 20 nt, synthetic construct
  source 1..20: mol_type = other RNA
tacaaattttttaccacagt

SEQ ID NO: 1574 - RNA, 20 nt, synthetic construct
  source 1..20: mol_type = other RNA
tacaacatttaagaactgta

SEQ ID NO: 1575 - RNA, 20 nt, synthetic construct
  source 1..20: mol_type = other RNA
tacaatcacataaccttaaa

SEQ ID NO: 1576 - RNA, 20 nt, synthetic construct
  source 1..20: mol_type = other RNA
tacaattaccagtcctctgt

SEQ ID NO: 1577 - RNA, 20 nt, synthetic construct
  source 1..20: mol_type = other RNA
tacacatactctgtgctgac

SEQ ID NO: 1578 - RNA, 20 nt, synthetic construct
  source 1..20: mol_type = other RNA
tacacgaatgtattagaatc

SEQ ID NO: 1579 - RNA, 20 nt, synthetic construct
  source 1..20: mol_type = other RNA
tacagaggactggtaattgt

SEQ ID NO: 1580 - RNA, 20 nt, synthetic construct
  source 1..20: mol_type = other RNA
tacagatttttacacatact

SEQ ID NO: 1581 - RNA, 20 nt, synthetic construct
  source 1..20: mol_type = other RNA
tacagtaagaatgaacatat

SEQ ID NO: 1582 - RNA, 20 nt, synthetic construct
  source 1..20: mol_type = other RNA
tacagtatttaattctgctt

SEQ ID NO: 1583 - RNA, 20 nt, synthetic construct
  source 1..20: mol_type = other RNA
tacagttcttaaatgttgta

SEQ ID NO: 1584 - RNA, 20 nt, synthetic construct
  source 1..20: mol_type = other RNA
tacataatgctaagtattga

SEQ ID NO: 1585 - RNA, 20 nt, synthetic construct
  source 1..20: mol_type = other RNA
tacatgcttgtcaggctgtt

SEQ ID NO: 1586 - RNA, 20 nt, synthetic construct
  source 1..20: mol_type = other RNA
tacattcgtgtaggttttca

SEQ ID NO: 1587 - RNA, 20 nt, synthetic construct
  source 1..20: mol_type = other RNA
tacatttctcaatcaaaatt

SEQ ID NO: 1588 - RNA, 20 nt, synthetic construct
  source 1..20: mol_type = other RNA
taccaaaatggctcctctct

SEQ ID NO: 1589 - RNA, 20 nt, synthetic construct
  source 1..20: mol_type = other RNA
taccacagtatcacttgtca

SEQ ID NO: 1590 - RNA, 20 nt, synthetic construct
  source 1..20: mol_type = other RNA
taccagattattagaccaca

SEQ ID NO: 1591 - RNA, 20 nt, synthetic construct
  source 1..20: mol_type = other RNA
taccagtcctctgtatttag

SEQ ID NO: 1592 - RNA, 20 nt, synthetic construct
  source 1..20: mol_type = other RNA
taccgtttacatttctcaat

SEQ ID NO: 1593 - RNA, 20 nt, synthetic construct
  source 1..20: mol_type = other RNA
tacctcatgttaaagtcaat

SEQ ID NO: 1594 - RNA, 20 nt, synthetic construct
  source 1..20: mol_type = other RNA
tacctttattattttgtact

SEQ ID NO: 1595 - RNA, 20 nt, synthetic construct
  source 1..20: mol_type = other RNA
tacctttgtcaatacttagc

SEQ ID NO: 1596 - RNA, 20 nt, synthetic construct
  source 1..20: mol_type = other RNA
tacgaggtttatttctactt

SEQ ID NO: 1597 - RNA, 20 nt, synthetic construct
  source 1..20: mol_type = other RNA
tactaagtcacattgacttt

SEQ ID NO: 1598 - RNA, 20 nt, synthetic construct
  source 1..20: mol_type = other RNA
tactacaacatttaagaact

SEQ ID NO: 1599 - RNA, 20 nt, synthetic construct
  source 1..20: mol_type = other RNA
tactagttttttaaactggg

SEQ ID NO: 1600 - RNA, 20 nt, synthetic construct
  source 1..20: mol_type = other RNA
tactccaaattattttgtag

SEQ ID NO: 1601 - RNA, 20 nt, synthetic construct
  source 1..20: mol_type = other RNA
tactctgtgctgacgatttt

SEQ ID NO: 1602 - RNA, 20 nt, synthetic construct
  source 1..20: mol_type = other RNA
tactcttgttaaaactctaa

SEQ ID NO: 1603 - RNA, 20 nt, synthetic construct
  source 1..20: mol_type = other RNA
tactgaacgtttaaacagcc

SEQ ID NO: 1604 - RNA, 20 nt, synthetic construct
  source 1..20: mol_type = other RNA
tactggcagttttaaaaaat

SEQ ID NO: 1605 - RNA, 20 nt, synthetic construct
  source 1..20: mol_type = other RNA
tactgtaatctgacaagatt

SEQ ID NO: 1606 - RNA, 20 nt, synthetic construct
  source 1..20: mol_type = other RNA
tactgtattaaaataagttc

SEQ ID NO: 1607 - RNA, 20 nt, synthetic construct
  source 1..20: mol_type = other RNA
tactgtggtaaaaaatttgt

SEQ ID NO: 1608 - RNA, 20 nt, synthetic construct
  source 1..20: mol_type = other RNA
tacttagcattatgtatttc

SEQ ID NO: 1609 - RNA, 20 nt, synthetic construct
  source 1..20: mol_type = other RNA
tacttaggattcacatagat

SEQ ID NO: 1610 - RNA, 20 nt, synthetic construct
  source 1..20: mol_type = other RNA
tacttgaaaacctacacgaa

SEQ ID NO: 1611 - RNA, 20 nt, synthetic construct
  source 1..20: mol_type = other RNA
tacttttctggaacaaaata

SEQ ID NO: 1612 - RNA, 20 nt, synthetic construct
  source 1..20: mol_type = other RNA
tagaaataaacctcgtaaca

SEQ ID NO: 1613 - RNA, 20 nt, synthetic construct
  source 1..20: mol_type = other RNA
tagaatcacagcatatttag

SEQ ID NO: 1614 - RNA, 20 nt, synthetic construct
  source 1..20: mol_type = other RNA
tagacagtgactttaagata

SEQ ID NO: 1615 - RNA, 20 nt, synthetic construct
  source 1..20: mol_type = other RNA
tagaccacattaacttggaa

SEQ ID NO: 1616 - RNA, 20 nt, synthetic construct
  source 1..20: mol_type = other RNA
tagaggaagcaactcatata

SEQ ID NO: 1617 - RNA, 20 nt, synthetic construct
  source 1..20: mol_type = other RNA
tagagttttaacaagagtac

SEQ ID NO: 1618 - RNA, 20 nt, synthetic construct
  source 1..20: mol_type = other RNA
tagatacaaattttttacca

SEQ ID NO: 1619 - RNA, 20 nt, synthetic construct
  source 1..20: mol_type = other RNA
tagatcatacatatctttta

SEQ ID NO: 1620 - RNA, 20 nt, synthetic construct
  source 1..20: mol_type = other RNA
tagatggtcacaatctagat

SEQ ID NO: 1621 - RNA, 20 nt, synthetic construct
  source 1..20: mol_type = other RNA
tagattataatcaataggtg

SEQ ID NO: 1622 - RNA, 20 nt, synthetic construct
  source 1..20: mol_type = other RNA
tagattgtgaccatctaaaa

SEQ ID NO: 1623 - RNA, 20 nt, synthetic construct
  source 1..20: mol_type = other RNA
tagcaaaatgaagcatcagt

SEQ ID NO: 1624 - RNA, 20 nt, synthetic construct
  source 1..20: mol_type = other RNA
tagcattatgtatttcaaat

SEQ ID NO: 1625 - RNA, 20 nt, synthetic construct
  source 1..20: mol_type = other RNA
tagctcatatgatgcctttt

SEQ ID NO: 1626 - RNA, 20 nt, synthetic construct
  source 1..20: mol_type = other RNA
taggattcacatagatcata

SEQ ID NO: 1627 - RNA, 20 nt, synthetic construct
  source 1..20: mol_type = other RNA
tagggactgggtctttgttt

SEQ ID NO: 1628 - RNA, 20 nt, synthetic construct
  source 1..20: mol_type = other RNA
tagggatctgttgtgatgtc

SEQ ID NO: 1629 - RNA, 20 nt, synthetic construct
  source 1..20: mol_type = other RNA
tagggatttagggatctgtt

SEQ ID NO: 1630 - RNA, 20 nt, synthetic construct
  source 1..20: mol_type = other RNA
tagggatttagggatttagg

SEQ ID NO: 1631 - RNA, 20 nt, synthetic construct
  source 1..20: mol_type = other RNA
tagggccagaataccaaaat

SEQ ID NO: 1632 - RNA, 20 nt, synthetic construct
  source 1..20: mol_type = other RNA
taggggaaatataaacttta

SEQ ID NO: 1633 - RNA, 20 nt, synthetic construct
  source 1..20: mol_type = other RNA
taggtcaccatataacttgg

SEQ ID NO: 1634 - RNA, 20 nt, synthetic construct
  source 1..20: mol_type = other RNA
taggtgaacttattaaataa

SEQ ID NO: 1635 - RNA, 20 nt, synthetic construct
  source 1..20: mol_type = other RNA
taggtttcataaataaatca

SEQ ID NO: 1636 - RNA, 20 nt, synthetic construct
  source 1..20: mol_type = other RNA
taggttttcaagtagaaata

SEQ ID NO: 1637 - RNA, 20 nt, synthetic construct
  source 1..20: mol_type = other RNA
tagtactcttgttaaaactc

SEQ ID NO: 1638 - RNA, 20 nt, synthetic construct
  source 1..20: mol_type = other RNA
tagtagtcatctccatttgt

SEQ ID NO: 1639 - RNA, 20 nt, synthetic construct
  source 1..20: mol_type = other RNA
tagtcaagtttagagtttta

SEQ ID NO: 1640 - RNA, 20 nt, synthetic construct
  source 1..20: mol_type = other RNA
tagtcatctccatttgttta

SEQ ID NO: 1641 - RNA, 20 nt, synthetic construct
  source 1..20: mol_type = other RNA
tagtctgtggtcctgaaaat

SEQ ID NO: 1642 - RNA, 20 nt, synthetic construct
  source 1..20: mol_type = other RNA
tagtgatacctcatgttaaa

SEQ ID NO: 1643 - RNA, 20 nt, synthetic construct
  source 1..20: mol_type = other RNA
tagtgcccaagttatatggt

SEQ ID NO: 1644 - RNA, 20 nt, synthetic construct
  source 1..20: mol_type = other RNA
tagttttttaaactgggaaa

SEQ ID NO: 1645 - RNA, 20 nt, synthetic construct
  source 1..20: mol_type = other RNA
tataaaagatatgtatgatc

SEQ ID NO: 1646 - RNA, 20 nt, synthetic construct
  source 1..20: mol_type = other RNA
tataaactttaactcgatgc

SEQ ID NO: 1647 - RNA, 20 nt, synthetic construct
  source 1..20: mol_type = other RNA
tataacttgggcactatatc

SEQ ID NO: 1648 - RNA, 20 nt, synthetic construct
  source 1..20: mol_type = other RNA
tataagaattttgattgaga

SEQ ID NO: 1649 - RNA, 20 nt, synthetic construct
  source 1..20: mol_type = other RNA
tataatcaataggtgaactt

SEQ ID NO: 1650 - RNA, 20 nt, synthetic construct
  source 1..20: mol_type = other RNA
tataatctagattgtgacca

SEQ ID NO: 1651 - RNA, 20 nt, synthetic construct
  source 1..20: mol_type = other RNA
tataatttagggactgggtc

SEQ ID NO: 1652 - RNA, 20 nt, synthetic construct
  source 1..20: mol_type = other RNA
tataattttcaggaccacag

SEQ ID NO: 1653 - RNA, 20 nt, synthetic construct
  source 1..20: mol_type = other RNA
tatacatgcttgtcaggctg

SEQ ID NO: 1654 - RNA, 20 nt, synthetic construct
  source 1..20: mol_type = other RNA
tatagtgatacctcatgtta

SEQ ID NO: 1655 - RNA, 20 nt, synthetic construct
  source 1..20: mol_type = other RNA
tatagtgcccaagttatatg

SEQ ID NO: 1656 - RNA, 20 nt, synthetic construct
  source 1..20: mol_type = other RNA
tatatacatgcttgtcaggc

SEQ ID NO: 1657 - RNA, 20 nt, synthetic construct
  source 1..20: mol_type = other RNA
tatatatgacatgtatattg

SEQ ID NO: 1658 - RNA, 20 nt, synthetic construct
  source 1..20: mol_type = other RNA
tatatcctttaacaaatggg

SEQ ID NO: 1659 - RNA, 20 nt, synthetic construct
  source 1..20: mol_type = other RNA
tatatgacatgtatattgga

SEQ ID NO: 1660 - RNA, 20 nt, synthetic construct
  source 1..20: mol_type = other RNA
tatatgagttgcttcctcta

SEQ ID NO: 1661 - RNA, 20 nt, synthetic construct
  source 1..20: mol_type = other RNA
tatatggtgacctacctttg

SEQ ID NO: 1662 - RNA, 20 nt, synthetic construct
  source 1..20: mol_type = other RNA
tatatttcccctaaatatgc

SEQ ID NO: 1663 - RNA, 20 nt, synthetic construct
  source 1..20: mol_type = other RNA
tatcaaacatttactccaaa

SEQ ID NO: 1664 - RNA, 20 nt, synthetic construct
  source 1..20: mol_type = other RNA
tatcacaactttcccagttt

SEQ ID NO: 1665 - RNA, 20 nt, synthetic construct
  source 1..20: mol_type = other RNA
tatcactataccttatttgt

SEQ ID NO: 1666 - RNA, 20 nt, synthetic construct
  source 1..20: mol_type = other RNA
tatcacttgtcagaatttat

SEQ ID NO: 1667 - RNA, 20 nt, synthetic construct
  source 1..20: mol_type = other RNA
tatccaatatacatgtcata

SEQ ID NO: 1668 - RNA, 20 nt, synthetic construct
  source 1..20: mol_type = other RNA
tatcctttaacaaatgggtt

SEQ ID NO: 1669 - RNA, 20 nt, synthetic construct
  source 1..20: mol_type = other RNA
tatcgacatcacaacagatc

SEQ ID NO: 1670 - RNA, 20 nt, synthetic construct
  source 1..20: mol_type = other RNA
tatctaatctttagggattt

SEQ ID NO: 1671 - RNA, 20 nt, synthetic construct
  source 1..20: mol_type = other RNA
tatcttaaagtcactgtcta

SEQ ID NO: 1672 - RNA, 20 nt, synthetic construct
  source 1..20: mol_type = other RNA
tatcttttatatatgtgaca

SEQ ID NO: 1673 - RNA, 20 nt, synthetic construct
  source 1..20: mol_type = other RNA
tatgaaacctaatgaagcag

SEQ ID NO: 1674 - RNA, 20 nt, synthetic construct
  source 1..20: mol_type = other RNA
tatgacatgtatattggata

SEQ ID NO: 1675 - RNA, 20 nt, synthetic construct
  source 1..20: mol_type = other RNA
tatgagctaatatcacaact

SEQ ID NO: 1676 - RNA, 20 nt, synthetic construct
  source 1..20: mol_type = other RNA
tatgagttgcttcctctatt

SEQ ID NO: 1677 - RNA, 20 nt, synthetic construct
  source 1..20: mol_type = other RNA
tatgatctatgtgaatccta

SEQ ID NO: 1678 - RNA, 20 nt, synthetic construct
  source 1..20: mol_type = other RNA
tatgatgccttttaaaataa

SEQ ID NO: 1679 - RNA, 20 nt, synthetic construct
  source 1..20: mol_type = other RNA
tatgatttatttatgaaacc

SEQ ID NO: 1680 - RNA, 20 nt, synthetic construct
  source 1..20: mol_type = other RNA
tatgattttttaaaactgcc

SEQ ID NO: 1681 - RNA, 20 nt, synthetic construct
  source 1..20: mol_type = other RNA
tatgctgtgattctaataca

SEQ ID NO: 1682 - RNA, 20 nt, synthetic construct
  source 1..20: mol_type = other RNA
tatggtgacctacctttgtc

SEQ ID NO: 1683 - RNA, 20 nt, synthetic construct
  source 1..20: mol_type = other RNA
tatgtatgatctatgtgaat

SEQ ID NO: 1684 - RNA, 20 nt, synthetic construct
  source 1..20: mol_type = other RNA
tatgtatttcaaattatcca

SEQ ID NO: 1685 - RNA, 20 nt, synthetic construct
  source 1..20: mol_type = other RNA
tatgtcacatatataaaaga

SEQ ID NO: 1686 - RNA, 20 nt, synthetic construct
  source 1..20: mol_type = other RNA
tatgtgaatcctaagtaaat

SEQ ID NO: 1687 - RNA, 20 nt, synthetic construct
  source 1..20: mol_type = other RNA
tatgtgattgtatgtttaat

SEQ ID NO: 1688 - RNA, 20 nt, synthetic construct
  source 1..20: mol_type = other RNA
tatgtgtaaaaatctgtaat

SEQ ID NO: 1689 - RNA, 20 nt, synthetic construct
  source 1..20: mol_type = other RNA
tatgttcattcttactgtaa

SEQ ID NO: 1690 - RNA, 20 nt, synthetic construct
  source 1..20: mol_type = other RNA
tattaaaataagttcgctgt

SEQ ID NO: 1691 - RNA, 20 nt, synthetic construct
  source 1..20: mol_type = other RNA
tattaaatccttaagagaaa

SEQ ID NO: 1692 - RNA, 20 nt, synthetic construct
  source 1..20: mol_type = other RNA
tattacagatttttacacat

SEQ ID NO: 1693 - RNA, 20 nt, synthetic construct
  source 1..20: mol_type = other RNA
tattagaatcacagcatatt

SEQ ID NO: 1694 - RNA, 20 nt, synthetic construct
  source 1..20: mol_type = other RNA
tattagaccacattaacttg

SEQ ID NO: 1695 - RNA, 20 nt, synthetic construct
  source 1..20: mol_type = other RNA
tattagctcatatgatgcct

SEQ ID NO: 1696 - RNA, 20 nt, synthetic construct
  source 1..20: mol_type = other RNA
tattattttgtacttttctg

SEQ ID NO: 1697 - RNA, 20 nt, synthetic construct
  source 1..20: mol_type = other RNA
tattcttgcatgtttatcga

SEQ ID NO: 1698 - RNA, 20 nt, synthetic construct
  source 1..20: mol_type = other RNA
tattctttaaggttatgtga

SEQ ID NO: 1699 - RNA, 20 nt, synthetic construct
  source 1..20: mol_type = other RNA
tattgacaaaggtaggtcac

SEQ ID NO: 1700 - RNA, 20 nt, synthetic construct
  source 1..20: mol_type = other RNA
tattggataatttgaaatac

SEQ ID NO: 1701 - RNA, 20 nt, synthetic construct
  source 1..20: mol_type = other RNA
tatttaataagttcacctat

SEQ ID NO: 1702 - RNA, 20 nt, synthetic construct
  source 1..20: mol_type = other RNA
tatttaatatatgagttgct

SEQ ID NO: 1703 - RNA, 20 nt, synthetic construct
  source 1..20: mol_type = other RNA
tatttaattctgcttcatta

SEQ ID NO: 1704 - RNA, 20 nt, synthetic construct
  source 1..20: mol_type = other RNA
tatttacttaggattcacat

SEQ ID NO: 1705 - RNA, 20 nt, synthetic construct
  source 1..20: mol_type = other RNA
tatttaggggaaatataaac

SEQ ID NO: 1706 - RNA, 20 nt, synthetic construct
  source 1..20: mol_type = other RNA
tatttagtcaagtttagagt

SEQ ID NO: 1707 - RNA, 20 nt, synthetic construct
  source 1..20: mol_type = other RNA
tatttatgaaacctaatgaa

SEQ ID NO: 1708 - RNA, 20 nt, synthetic construct
  source 1..20: mol_type = other RNA
tatttcccctaaatatgctg

SEQ ID NO: 1709 - RNA, 20 nt, synthetic construct
  source 1..20: mol_type = other RNA
tatttctacttgaaaaccta

SEQ ID NO: 1710 - RNA, 20 nt, synthetic construct
  source 1..20: mol_type = other RNA
tatttctcaagctttctctt

SEQ ID NO: 1711 - RNA, 20 nt, synthetic construct
  source 1..20: mol_type = other RNA
tatttgtggcatcgagttaa

SEQ ID NO: 1712 - RNA, 20 nt, synthetic construct
  source 1..20: mol_type = other RNA
tattttaaaaggcatcatat

SEQ ID NO: 1713 - RNA, 20 nt, synthetic construct
  source 1..20: mol_type = other RNA
tattttgcatttgaaattgt

SEQ ID NO: 1714 - RNA, 20 nt, synthetic construct
  source 1..20: mol_type = other RNA
tattttgtacttttctggaa

SEQ ID NO: 1715 - RNA, 20 nt, synthetic construct
  source 1..20: mol_type = other RNA
tattttgtagcaaaatgaag

SEQ ID NO: 1716 - RNA, 20 nt, synthetic construct
  source 1..20: mol_type = other RNA
tattttgttccagaaaagta

SEQ ID NO: 1717 - RNA, 20 nt, synthetic construct
  source 1..20: mol_type = other RNA
tcaaaactaaaaatcgtcag

SEQ ID NO: 1718 - RNA, 20 nt, synthetic construct
  source 1..20: mol_type = other RNA
tcaaacatttactccaaatt

SEQ ID NO: 1719 - RNA, 20 nt, synthetic construct
  source 1..20: mol_type = other RNA
tcaaatgcaaaataattcat

SEQ ID NO: 1720 - RNA, 20 nt, synthetic construct
  source 1..20: mol_type = other RNA
tcaaattatccaatatacat

SEQ ID NO: 1721 - RNA, 20 nt, synthetic construct
  source 1..20: mol_type = other RNA
tcaagctttctcttaaggat

SEQ ID NO: 1722 - RNA, 20 nt, synthetic construct
  source 1..20: mol_type = other RNA
tcaagtagaaataaacctcg

SEQ ID NO: 1723 - RNA, 20 nt, synthetic construct
  source 1..20: mol_type = other RNA
tcaagtttagagttttaaca

SEQ ID NO: 1724 - RNA, 20 nt, synthetic construct
  source 1..20: mol_type = other RNA
tcaataaacaaagacccagt

SEQ ID NO: 1725 - RNA, 20 nt, synthetic construct
  source 1..20: mol_type = other RNA
tcaatacttagcattatgta

SEQ ID NO: 1726 - RNA, 20 nt, synthetic construct
  source 1..20: mol_type = other RNA
tcaataggtgaacttattaa

SEQ ID NO: 1727 - RNA, 20 nt, synthetic construct
  source 1..20: mol_type = other RNA
tcaatgtgacttagtagtca

SEQ ID NO: 1728 - RNA, 20 nt, synthetic construct
  source 1..20: mol_type = other RNA
tcaattttagatggtcacaa

SEQ ID NO: 1729 - RNA, 20 nt, synthetic construct
  source 1..20: mol_type = other RNA
tcacaacagatccctaaatc

SEQ ID NO: 1730 - RNA, 20 nt, synthetic construct
  source 1..20: mol_type = other RNA
tcacaactttcccagtttaa

SEQ ID NO: 1731 - RNA, 20 nt, synthetic construct
  source 1..20: mol_type = other RNA
tcacaatctagattataatc

SEQ ID NO: 1732 - RNA, 20 nt, synthetic construct
  source 1..20: mol_type = other RNA
tcacagcatatttaggggaa

SEQ ID NO: 1733 - RNA, 20 nt, synthetic construct
  source 1..20: mol_type = other RNA
tcacataaccttaaagaata

SEQ ID NO: 1734 - RNA, 20 nt, synthetic construct
  source 1..20: mol_type = other RNA
tcacatagatcatacatatc

SEQ ID NO: 1735 - RNA, 20 nt, synthetic construct
  source 1..20: mol_type = other RNA
tcacatatataaaagatatg

SEQ ID NO: 1736 - RNA, 20 nt, synthetic construct
  source 1..20: mol_type = other RNA
tcacattgactttaacatga

SEQ ID NO: 1737 - RNA, 20 nt, synthetic construct
  source 1..20: mol_type = other RNA
tcaccatataacttgggcac

SEQ ID NO: 1738 - RNA, 20 nt, synthetic construct
  source 1..20: mol_type = other RNA
tcacctattgattataatct

SEQ ID NO: 1739 - RNA, 20 nt, synthetic construct
  source 1..20: mol_type = other RNA
tcactataccttatttgtta

SEQ ID NO: 1740 - RNA, 20 nt, synthetic construct
  source 1..20: mol_type = other RNA
tcactgtctatttaagatta

SEQ ID NO: 1741 - RNA, 20 nt, synthetic construct
  source 1..20: mol_type = other RNA
tcacttgtcagaatttattt

SEQ ID NO: 1742 - RNA, 20 nt, synthetic construct
  source 1..20: mol_type = other RNA
tcagattacagtaagaatga

SEQ ID NO: 1743 - RNA, 20 nt, synthetic construct
  source 1..20: mol_type = other RNA
tcagcacagagtatgtgtaa

SEQ ID NO: 1744 - RNA, 20 nt, synthetic construct
  source 1..20: mol_type = other RNA
tcagcgttaatttcgacagc

SEQ ID NO: 1745 - RNA, 20 nt, synthetic construct
  source 1..20: mol_type = other RNA
tcaggaccacagactaagct

SEQ ID NO: 1746 - RNA, 20 nt, synthetic construct
  source 1..20: mol_type = other RNA
tcaggctgtttaaacgttca

SEQ ID NO: 1747 - RNA, 20 nt, synthetic construct
  source 1..20: mol_type = other RNA
tcagtaacttgttacgaggt

SEQ ID NO: 1748 - RNA, 20 nt, synthetic construct
  source 1..20: mol_type = other RNA
tcatagtattaagtgttaaa

SEQ ID NO: 1749 - RNA, 20 nt, synthetic construct
  source 1..20: mol_type = other RNA
tcatatcaaacatttactcc

SEQ ID NO: 1750 - RNA, 20 nt, synthetic construct
  source 1..20: mol_type = other RNA
tcatatgagctaatatcaca

SEQ ID NO: 1751 - RNA, 20 nt, synthetic construct
  source 1..20: mol_type = other RNA
tcatatgatgccttttaaaa

SEQ ID NO: 1752 - RNA, 20 nt, synthetic construct
  source 1..20: mol_type = other RNA
tcatctccatttgtttaaag

SEQ ID NO: 1753 - RNA, 20 nt, synthetic construct
  source 1..20: mol_type = other RNA
tcatgttaaagtcaatgtga

SEQ ID NO: 1754 - RNA, 20 nt, synthetic construct
  source 1..20: mol_type = other RNA
tcattaggtttcataaataa

SEQ ID NO: 1755 - RNA, 20 nt, synthetic construct
  source 1..20: mol_type = other RNA
tcattccaagttaatgtggt

SEQ ID NO: 1756 - RNA, 20 nt, synthetic construct
  source 1..20: mol_type = other RNA
tcattcttactgtaatctga

SEQ ID NO: 1757 - RNA, 20 nt, synthetic construct
  source 1..20: mol_type = other RNA
tcattttgctacaaaataat

SEQ ID NO: 1758 - RNA, 20 nt, synthetic construct
  source 1..20: mol_type = other RNA
tccaaattattttgtagcaa

SEQ ID NO: 1759 - RNA, 20 nt, synthetic construct
  source 1..20: mol_type = other RNA
tccaagttaatgtggtctaa

SEQ ID NO: 1760 - RNA, 20 nt, synthetic construct
  source 1..20: mol_type = other RNA
tccaatatacatgtcatata

SEQ ID NO: 1761 - RNA, 20 nt, synthetic construct
  source 1..20: mol_type = other RNA
tccaattttgggggaagaga

SEQ ID NO: 1762 - RNA, 20 nt, synthetic construct
  source 1..20: mol_type = other RNA
tccagaaaagtacaaaataa

SEQ ID NO: 1763 - RNA, 20 nt, synthetic construct
  source 1..20: mol_type = other RNA
tccatttgtttaaagacagc

SEQ ID NO: 1764 - RNA, 20 nt, synthetic construct
  source 1..20: mol_type = other RNA
tcccacatcacaaaatttaa

SEQ ID NO: 1765 - RNA, 20 nt, synthetic construct
  source 1..20: mol_type = other RNA
tcccagtttaaaaaactagt

SEQ ID NO: 1766 - RNA, 20 nt, synthetic construct
  source 1..20: mol_type = other RNA
tcccccaaaattggacaatt

SEQ ID NO: 1767 - RNA, 20 nt, synthetic construct
  source 1..20: mol_type = other RNA
tcccctaaatatgctgtgat

SEQ ID NO: 1768 - RNA, 20 nt, synthetic construct
  source 1..20: mol_type = other RNA
tccctaaagattagatacaa

SEQ ID NO: 1769 - RNA, 20 nt, synthetic construct
  source 1..20: mol_type = other RNA
tccctaaatccctaaagatt

SEQ ID NO: 1770 - RNA, 20 nt, synthetic construct
  source 1..20: mol_type = other RNA
tccctaaatccctaaatccc

SEQ ID NO: 1771 - RNA, 20 nt, synthetic construct
  source 1..20: mol_type = other RNA
tccctaaattatagaaattt

SEQ ID NO: 1772 - RNA, 20 nt, synthetic construct
  source 1..20: mol_type = other RNA
tcctaagtaaatattttgtt

SEQ ID NO: 1773 - RNA, 20 nt, synthetic construct
  source 1..20: mol_type = other RNA
tcctctcttcccccaaaatt

SEQ ID NO: 1774 - RNA, 20 nt, synthetic construct
  source 1..20: mol_type = other RNA
tcctctgtatttagtcaagt

SEQ ID NO: 1775 - RNA, 20 nt, synthetic construct
  source 1..20: mol_type = other RNA
tcctgaaaattatagattat

SEQ ID NO: 1776 - RNA, 20 nt, synthetic construct
  source 1..20: mol_type = other RNA
tccttaagagaaagcttgag

SEQ ID NO: 1777 - RNA, 20 nt, synthetic construct
  source 1..20: mol_type = other RNA
tcctttaacaaatgggttta

SEQ ID NO: 1778 - RNA, 20 nt, synthetic construct
  source 1..20: mol_type = other RNA
tcctttacaattatttgttt

SEQ ID NO: 1779 - RNA, 20 nt, synthetic construct
  source 1..20: mol_type = other RNA
tcgaaattaacgctgatttt

SEQ ID NO: 1780 - RNA, 20 nt, synthetic construct
  source 1..20: mol_type = other RNA
tcgacagcttagtctgtggt

SEQ ID NO: 1781 - RNA, 20 nt, synthetic construct
  source 1..20: mol_type = other RNA
tcgacatcacaacagatccc

SEQ ID NO: 1782 - RNA, 20 nt, synthetic construct
  source 1..20: mol_type = other RNA
tcgagttaaagtttatattt

SEQ ID NO: 1783 - RNA, 20 nt, synthetic construct
  source 1..20: mol_type = other RNA
tcgataaacatgcaagaata

SEQ ID NO: 1784 - RNA, 20 nt, synthetic construct
  source 1..20: mol_type = other RNA
tcgatgccacaaatatgttc

SEQ ID NO: 1785 - RNA, 20 nt, synthetic construct
  source 1..20: mol_type = other RNA
tcgctgtctttaaacaaatg

SEQ ID NO: 1786 - RNA, 20 nt, synthetic construct
  source 1..20: mol_type = other RNA
tcgtaacaagttactgaacg

SEQ ID NO: 1787 - RNA, 20 nt, synthetic construct
  source 1..20: mol_type = other RNA
tcgtcagcacagagtatgtg

SEQ ID NO: 1788 - RNA, 20 nt, synthetic construct
  source 1..20: mol_type = other RNA
tcgtgtaggttttcaagtag

SEQ ID NO: 1789 - RNA, 20 nt, synthetic construct
  source 1..20: mol_type = other RNA
tctaaaattgattcccacat

SEQ ID NO: 1790 - RNA, 20 nt, synthetic construct
  source 1..20: mol_type = other RNA
tctaaacttgactaaataca

SEQ ID NO: 1791 - RNA, 20 nt, synthetic construct
  source 1..20: mol_type = other RNA
tctaataatctggtattaaa

SEQ ID NO: 1792 - RNA, 20 nt, synthetic construct
  source 1..20: mol_type = other RNA
tctaatacattcgtgtaggt

SEQ ID NO: 1793 - RNA, 20 nt, synthetic construct
  source 1..20: mol_type = other RNA
tctaatctttagggatttag

SEQ ID NO: 1794 - RNA, 20 nt, synthetic construct
  source 1..20: mol_type = other RNA
tctacttgaaaacctacacg

SEQ ID NO: 1795 - RNA, 20 nt, synthetic construct
  source 1..20: mol_type = other RNA
tctagattataatcaatagg

SEQ ID NO: 1796 - RNA, 20 nt, synthetic construct
  source 1..20: mol_type = other RNA
tctagattgtgaccatctaa

SEQ ID NO: 1797 - RNA, 20 nt, synthetic construct
  source 1..20: mol_type = other RNA
tctataatttagggactggg

SEQ ID NO: 1798 - RNA, 20 nt, synthetic construct
  source 1..20: mol_type = other RNA
tctataattttcaggaccac

SEQ ID NO: 1799 - RNA, 20 nt, synthetic construct
  source 1..20: mol_type = other RNA
tctatgtgaatcctaagtaa

SEQ ID NO: 1800 - RNA, 20 nt, synthetic construct
  source 1..20: mol_type = other RNA
tctatttctcaagctttctc

SEQ ID NO: 1801 - RNA, 20 nt, synthetic construct
  source 1..20: mol_type = other RNA
tctcaagctttctcttaagg

SEQ ID NO: 1802 - RNA, 20 nt, synthetic construct
  source 1..20: mol_type = other RNA
tctcaatcaaaattcttata

SEQ ID NO: 1803 - RNA, 20 nt, synthetic construct
  source 1..20: mol_type = other RNA
tctccatttgtttaaagaca

SEQ ID NO: 1804 - RNA, 20 nt, synthetic construct
  source 1..20: mol_type = other RNA
tctcttaaggatttaatacc

SEQ ID NO: 1805 - RNA, 20 nt, synthetic construct
  source 1..20: mol_type = other RNA
tctcttcccccaaaattgga

SEQ ID NO: 1806 - RNA, 20 nt, synthetic construct
  source 1..20: mol_type = other RNA
tctgacaagattcctttaca

SEQ ID NO: 1807 - RNA, 20 nt, synthetic construct
  source 1..20: mol_type = other RNA
tctgacaagtgatactgtgg

SEQ ID NO: 1808 - RNA, 20 nt, synthetic construct
  source 1..20: mol_type = other RNA
tctgcttcattaggtttcat

SEQ ID NO: 1809 - RNA, 20 nt, synthetic construct
  source 1..20: mol_type = other RNA
tctggaacaaaatatttact

SEQ ID NO: 1810 - RNA, 20 nt, synthetic construct
  source 1..20: mol_type = other RNA
tctggtattaaatccttaag

SEQ ID NO: 1811 - RNA, 20 nt, synthetic construct
  source 1..20: mol_type = other RNA
tctgtatttagtcaagttta

SEQ ID NO: 1812 - RNA, 20 nt, synthetic construct
  source 1..20: mol_type = other RNA
tctgtgctgacgatttttag

SEQ ID NO: 1813 - RNA, 20 nt, synthetic construct
  source 1..20: mol_type = other RNA
tctgtggtcctgaaaattat

SEQ ID NO: 1814 - RNA, 20 nt, synthetic construct
  source 1..20: mol_type = other RNA
tctgttgtgatgtcgataaa

SEQ ID NO: 1815 - RNA, 20 nt, synthetic construct
  source 1..20: mol_type = other RNA
tcttaaagtcactgtctatt

SEQ ID NO: 1816 - RNA, 20 nt, synthetic construct
  source 1..20: mol_type = other RNA
tcttaaatagacagtgactt

SEQ ID NO: 1817 - RNA, 20 nt, synthetic construct
  source 1..20: mol_type = other RNA
tcttaaatgttgtagtatta

SEQ ID NO: 1818 - RNA, 20 nt, synthetic construct
  source 1..20: mol_type = other RNA
tcttaaggatttaataccag

SEQ ID NO: 1819 - RNA, 20 nt, synthetic construct
  source 1..20: mol_type = other RNA
tcttactggcagttttaaaa

SEQ ID NO: 1820 - RNA, 20 nt, synthetic construct
  source 1..20: mol_type = other RNA
tcttactgtaatctgacaag

SEQ ID NO: 1821 - RNA, 20 nt, synthetic construct
  source 1..20: mol_type = other RNA
tcttcccccaaaattggaca

SEQ ID NO: 1822 - RNA, 20 nt, synthetic construct
  source 1..20: mol_type = other RNA
tcttgcatgtttatcgacat

SEQ ID NO: 1823 - RNA, 20 nt, synthetic construct
  source 1..20: mol_type = other RNA
tcttgtcagattacagtaag

SEQ ID NO: 1824 - RNA, 20 nt, synthetic construct
  source 1..20: mol_type = other RNA
tcttgttaaaactctaaact

SEQ ID NO: 1825 - RNA, 20 nt, synthetic construct
  source 1..20: mol_type = other RNA
tctttaaacaaatggagatg

SEQ ID NO: 1826 - RNA, 20 nt, synthetic construct
  source 1..20: mol_type = other RNA
tctttaaggttatgtgattg

SEQ ID NO: 1827 - RNA, 20 nt, synthetic construct
  source 1..20: mol_type = other RNA
tctttagggatttagggatt

SEQ ID NO: 1828 - RNA, 20 nt, synthetic construct
  source 1..20: mol_type = other RNA
tcttttatatatgtgacata

SEQ ID NO: 1829 - RNA, 20 nt, synthetic construct
  source 1..20: mol_type = other RNA
tgaaaacctacacgaatgta

SEQ ID NO: 1830 - RNA, 20 nt, synthetic construct
  source 1..20: mol_type = other RNA
tgaaacctaatgaagcagaa

SEQ ID NO: 1831 - RNA, 20 nt, synthetic construct
  source 1..20: mol_type = other RNA
tgaaatacataatgctaagt

SEQ ID NO: 1832 - RNA, 20 nt, synthetic construct
  source 1..20: mol_type = other RNA
tgaaattaatactacaacat

SEQ ID NO: 1833 - RNA, 20 nt, synthetic construct
  source 1..20: mol_type = other RNA
tgaaattgtccaattttggg

SEQ ID NO: 1834 - RNA, 20 nt, synthetic construct
  source 1..20: mol_type = other RNA
tgaacatatttgtggcatcg

SEQ ID NO: 1835 - RNA, 20 nt, synthetic construct
  source 1..20: mol_type = other RNA
tgaacgtttaaacagcctga

SEQ ID NO: 1836 - RNA, 20 nt, synthetic construct
  source 1..20: mol_type = other RNA
tgaagcagaattaaatactg

SEQ ID NO: 1837 - RNA, 20 nt, synthetic construct
  source 1..20: mol_type = other RNA
tgaagcatcagtttaaaaat

SEQ ID NO: 1838 - RNA, 20 nt, synthetic construct
  source 1..20: mol_type = other RNA
tgaatcctaagtaaatattt

SEQ ID NO: 1839 - RNA, 20 nt, synthetic construct
  source 1..20: mol_type = other RNA
tgaattattttgcatttgaa

SEQ ID NO: 1840 - RNA, 20 nt, synthetic construct
  source 1..20: mol_type = other RNA
tgacaaaggtaggtcaccat

SEQ ID NO: 1841 - RNA, 20 nt, synthetic construct
  source 1..20: mol_type = other RNA
tgacaagattcctttacaat

SEQ ID NO: 1842 - RNA, 20 nt, synthetic construct
  source 1..20: mol_type = other RNA
tgacaagcatgtatatatgt

SEQ ID NO: 1843 - RNA, 20 nt, synthetic construct
  source 1..20: mol_type = other RNA
tgacaagtgatactgtggta

SEQ ID NO: 1844 - RNA, 20 nt, synthetic construct
  source 1..20: mol_type = other RNA
tgacatgtatattggataat

SEQ ID NO: 1845 - RNA, 20 nt, synthetic construct
  source 1..20: mol_type = other RNA
tgaccatctaaaattgattc

SEQ ID NO: 1846 - RNA, 20 nt, synthetic construct
  source 1..20: mol_type = other RNA
tgacctacctttgtcaatac

SEQ ID NO: 1847 - RNA, 20 nt, synthetic construct
  source 1..20: mol_type = other RNA
tgacgatttttagttttgaa

SEQ ID NO: 1848 - RNA, 20 nt, synthetic construct
  source 1..20: mol_type = other RNA
tgactaaatacagaggactg

SEQ ID NO: 1849 - RNA, 20 nt, synthetic construct
  source 1..20: mol_type = other RNA
tgactactaagtcacattga

SEQ ID NO: 1850 - RNA, 20 nt, synthetic construct
  source 1..20: mol_type = other RNA
tgacttagtagtcatctcca

SEQ ID NO: 1851 - RNA, 20 nt, synthetic construct
  source 1..20: mol_type = other RNA
tgactttaacatgaggtatc

SEQ ID NO: 1852 - RNA, 20 nt, synthetic construct
  source 1..20: mol_type = other RNA
tgagaaatgtaaacggtatt

SEQ ID NO: 1853 - RNA, 20 nt, synthetic construct
  source 1..20: mol_type = other RNA
tgagctaatatcacaacttt

SEQ ID NO: 1854 - RNA, 20 nt, synthetic construct
  source 1..20: mol_type = other RNA
tgaggcaaatttaaaaggca

SEQ ID NO: 1855 - RNA, 20 nt, synthetic construct
  source 1..20: mol_type = other RNA
tgaggtatcactatacctta

SEQ ID NO: 1856 - RNA, 20 nt, synthetic construct
  source 1..20: mol_type = other RNA
tgaggttaatgtttaaatta

SEQ ID NO: 1857 - RNA, 20 nt, synthetic construct
  source 1..20: mol_type = other RNA
tgatacctcatgttaaagtc

SEQ ID NO: 1858 - RNA, 20 nt, synthetic construct
  source 1..20: mol_type = other RNA
tgatactgtggtaaaaaatt

SEQ ID NO: 1859 - RNA, 20 nt, synthetic construct
  source 1..20: mol_type = other RNA
tgatattagctcatatgatg

SEQ ID NO: 1860 - RNA, 20 nt, synthetic construct
  source 1..20: mol_type = other RNA
tgatctatgtgaatcctaag

SEQ ID NO: 1861 - RNA, 20 nt, synthetic construct
  source 1..20: mol_type = other RNA
tgatgccttttaaaataaaa

SEQ ID NO: 1862 - RNA, 20 nt, synthetic construct
  source 1..20: mol_type = other RNA
tgatgcttcattttgctaca

SEQ ID NO: 1863 - RNA, 20 nt, synthetic construct
  source 1..20: mol_type = other RNA
tgatgtcgataaacatgcaa

SEQ ID NO: 1864 - RNA, 20 nt, synthetic construct
  source 1..20: mol_type = other RNA
tgatgtgggaatcaatttta

SEQ ID NO: 1865 - RNA, 20 nt, synthetic construct
  source 1..20: mol_type = other RNA
tgattataatctagattgtg

SEQ ID NO: 1866 - RNA, 20 nt, synthetic construct
  source 1..20: mol_type = other RNA
tgattcccacatcacaaaat

SEQ ID NO: 1867 - RNA, 20 nt, synthetic construct
  source 1..20: mol_type = other RNA
tgattctaatacattcgtgt

SEQ ID NO: 1868 - RNA, 20 nt, synthetic construct
  source 1..20: mol_type = other RNA
tgattgagaaatgtaaacgg

SEQ ID NO: 1869 - RNA, 20 nt, synthetic construct
  source 1..20: mol_type = other RNA
tgattgtatgtttaatctta

SEQ ID NO: 1870 - RNA, 20 nt, synthetic construct
  source 1..20: mol_type = other RNA
tgatttatttatgaaaccta

SEQ ID NO: 1871 - RNA, 20 nt, synthetic construct
  source 1..20: mol_type = other RNA
tgattttttaaaactgccag

SEQ ID NO: 1872 - RNA, 20 nt, synthetic construct
  source 1..20: mol_type = other RNA
tgcatgtttatcgacatcac

SEQ ID NO: 1873 - RNA, 20 nt, synthetic construct
  source 1..20: mol_type = other RNA
tgcatttgaaattgtccaat

SEQ ID NO: 1874 - RNA, 20 nt, synthetic construct
  source 1..20: mol_type = other RNA
tgccacaaatatgttcattc

SEQ ID NO: 1875 - RNA, 20 nt, synthetic construct
  source 1..20: mol_type = other RNA
tgccagtaagaaattttaaa

SEQ ID NO: 1876 - RNA, 20 nt, synthetic construct
  source 1..20: mol_type = other RNA
tgcccaagttatatggtgac

SEQ ID NO: 1877 - RNA, 20 nt, synthetic construct
  source 1..20: mol_type = other RNA
tgccttttaaaataaaagtc

SEQ ID NO: 1878 - RNA, 20 nt, synthetic construct
  source 1..20: mol_type = other RNA
tgctaagtattgacaaaggt

SEQ ID NO: 1879 - RNA, 20 nt, synthetic construct
  source 1..20: mol_type = other RNA
tgctacaaaataatttggag

SEQ ID NO: 1880 - RNA, 20 nt, synthetic construct
  source 1..20: mol_type = other RNA
tgctgacgatttttagtttt

SEQ ID NO: 1881 - RNA, 20 nt, synthetic construct
  source 1..20: mol_type = other RNA
tgctgtgattctaatacatt

SEQ ID NO: 1882 - RNA, 20 nt, synthetic construct
  source 1..20: mol_type = other RNA
tgcttcattaggtttcataa

SEQ ID NO: 1883 - RNA, 20 nt, synthetic construct
  source 1..20: mol_type = other RNA
tgcttcattttgctacaaaa

SEQ ID NO: 1884 - RNA, 20 nt, synthetic construct
  source 1..20: mol_type = other RNA
tgcttgtcaggctgtttaaa

SEQ ID NO: 1885 - RNA, 20 nt, synthetic construct
  source 1..20: mol_type = other RNA
tggaacaaaatatttactta

SEQ ID NO: 1886 - RNA, 20 nt, synthetic construct
  source 1..20: mol_type = other RNA
tggaatgaggttaatgttta

SEQ ID NO: 1887 - RNA, 20 nt, synthetic construct
  source 1..20: mol_type = other RNA
tggacaatttcaaatgcaaa

SEQ ID NO: 1888 - RNA, 20 nt, synthetic construct
  source 1..20: mol_type = other RNA
tggagatgactactaagtca

SEQ ID NO: 1889 - RNA, 20 nt, synthetic construct
  source 1..20: mol_type = other RNA
tggagtaaatgtttgatatg

SEQ ID NO: 1890 - RNA, 20 nt, synthetic construct
  source 1..20: mol_type = other RNA
tggataatttgaaatacata

SEQ ID NO: 1891 - RNA, 20 nt, synthetic construct
  source 1..20: mol_type = other RNA
tggcagttttaaaaaatcat

SEQ ID NO: 1892 - RNA, 20 nt, synthetic construct
  source 1..20: mol_type = other RNA
tggcatcgagttaaagttta

SEQ ID NO: 1893 - RNA, 20 nt, synthetic construct
  source 1..20: mol_type = other RNA
tggctcctctcttcccccaa

SEQ ID NO: 1894 - RNA, 20 nt, synthetic construct
  source 1..20: mol_type = other RNA
tgggaaagttgtgatattag

SEQ ID NO: 1895 - RNA, 20 nt, synthetic construct
  source 1..20: mol_type = other RNA
tgggaatcaattttagatgg

SEQ ID NO: 1896 - RNA, 20 nt, synthetic construct
  source 1..20: mol_type = other RNA
tgggcactatatcctttaac

SEQ ID NO: 1897 - RNA, 20 nt, synthetic construct
  source 1..20: mol_type = other RNA
tgggggaagagaggagccat

SEQ ID NO: 1898 - RNA, 20 nt, synthetic construct
  source 1..20: mol_type = other RNA
tgggtctttgtttattgaat

SEQ ID NO: 1899 - RNA, 20 nt, synthetic construct
  source 1..20: mol_type = other RNA
tgggtttaatttaaaatttc

SEQ ID NO: 1900 - RNA, 20 nt, synthetic construct
  source 1..20: mol_type = other RNA
tggtaaaaaatttgtatcta

SEQ ID NO: 1901 - RNA, 20 nt, synthetic construct
  source 1..20: mol_type = other RNA
tggtaattgtacagttctta

SEQ ID NO: 1902 - RNA, 20 nt, synthetic construct
  source 1..20: mol_type = other RNA
tggtattaaatccttaagag

SEQ ID NO: 1903 - RNA, 20 nt, synthetic construct
  source 1..20: mol_type = other RNA
tggtattctggccctaaaaa

SEQ ID NO: 1904 - RNA, 20 nt, synthetic construct
  source 1..20: mol_type = other RNA
tggtcacaatctagattata

SEQ ID NO: 1905 - RNA, 20 nt, synthetic construct
  source 1..20: mol_type = other RNA
tggtcctgaaaattatagat

SEQ ID NO: 1906 - RNA, 20 nt, synthetic construct
  source 1..20: mol_type = other RNA
tggtctaataatctggtatt

SEQ ID NO: 1907 - RNA, 20 nt, synthetic construct
  source 1..20: mol_type = other RNA
tggtgacctacctttgtcaa

SEQ ID NO: 1908 - RNA, 20 nt, synthetic construct
  source 1..20: mol_type = other RNA
tgtaaaaatctgtaatacaa

SEQ ID NO: 1909 - RNA, 20 nt, synthetic construct
  source 1..20: mol_type = other RNA
tgtaaacggtattctttaag

SEQ ID NO: 1910 - RNA, 20 nt, synthetic construct
  source 1..20: mol_type = other RNA
tgtaaaggaatcttgtcaga

SEQ ID NO: 1911 - RNA, 20 nt, synthetic construct
  source 1..20: mol_type = other RNA
tgtaatctgacaagattcct

SEQ ID NO: 1912 - RNA, 20 nt, synthetic construct
  source 1..20: mol_type = other RNA
tgtacaattaccagtcctct

SEQ ID NO: 1913 - RNA, 20 nt, synthetic construct
  source 1..20: mol_type = other RNA
tgtacagttcttaaatgttg

SEQ ID NO: 1914 - RNA, 20 nt, synthetic construct
  source 1..20: mol_type = other RNA
tgtacttttctggaacaaaa

SEQ ID NO: 1915 - RNA, 20 nt, synthetic construct
  source 1..20: mol_type = other RNA
tgtagcaaaatgaagcatca

SEQ ID NO: 1916 - RNA, 20 nt, synthetic construct
  source 1..20: mol_type = other RNA
tgtaggttttcaagtagaaa

SEQ ID NO: 1917 - RNA, 20 nt, synthetic construct
  source 1..20: mol_type = other RNA
tgtagtattaatttcaaaac

SEQ ID NO: 1918 - RNA, 20 nt, synthetic construct
  source 1..20: mol_type = other RNA
tgtatattggataatttgaa

SEQ ID NO: 1919 - RNA, 20 nt, synthetic construct
  source 1..20: mol_type = other RNA
tgtatctaatctttagggat

SEQ ID NO: 1920 - RNA, 20 nt, synthetic construct
  source 1..20: mol_type = other RNA
tgtatgatctatgtgaatcc

SEQ ID NO: 1921 - RNA, 20 nt, synthetic construct
  source 1..20: mol_type = other RNA
tgtattaaaataagttcgct

SEQ ID NO: 1922 - RNA, 20 nt, synthetic construct
  source 1..20: mol_type = other RNA
tgtattacagatttttacac

SEQ ID NO: 1923 - RNA, 20 nt, synthetic construct
  source 1..20: mol_type = other RNA
tgtattagaatcacagcata

SEQ ID NO: 1924 - RNA, 20 nt, synthetic construct
  source 1..20: mol_type = other RNA
tgtatttagtcaagtttaga

SEQ ID NO: 1925 - RNA, 20 nt, synthetic construct
  source 1..20: mol_type = other RNA
tgtatttcaaattatccaat

SEQ ID NO: 1926 - RNA, 20 nt, synthetic construct
  source 1..20: mol_type = other RNA
tgtcaatacttagcattatg

SEQ ID NO: 1927 - RNA, 20 nt, synthetic construct
  source 1..20: mol_type = other RNA
tgtcacatatataaaagata

SEQ ID NO: 1928 - RNA, 20 nt, synthetic construct
  source 1..20: mol_type = other RNA
tgtcagattacagtaagaat

SEQ ID NO: 1929 - RNA, 20 nt, synthetic construct
  source 1..20: mol_type = other RNA
tgtcaggctgtttaaacgtt

SEQ ID NO: 1930 - RNA, 20 nt, synthetic construct
  source 1..20: mol_type = other RNA
tgtccaattttgggggaaga

SEQ ID NO: 1931 - RNA, 20 nt, synthetic construct
  source 1..20: mol_type = other RNA
tgtcgaaattaacgctgatt

SEQ ID NO: 1932 - RNA, 20 nt, synthetic construct
  source 1..20: mol_type = other RNA
tgtcgataaacatgcaagaa

SEQ ID NO: 1933 - RNA, 20 nt, synthetic construct
  source 1..20: mol_type = other RNA
tgtctatttaagattaaaca

SEQ ID NO: 1934 - RNA, 20 nt, synthetic construct
  source 1..20: mol_type = other RNA
tgtctttaaacaaatggaga

SEQ ID NO: 1935 - RNA, 20 nt, synthetic construct
  source 1..20: mol_type = other RNA
tgtgaatcctaagtaaatat

SEQ ID NO: 1936 - RNA, 20 nt, synthetic construct
  source 1..20: mol_type = other RNA
tgtgaccatctaaaattgat

SEQ ID NO: 1937 - RNA, 20 nt, synthetic construct
  source 1..20: mol_type = other RNA
tgtgacttagtagtcatctc

SEQ ID NO: 1938 - RNA, 20 nt, synthetic construct
  source 1..20: mol_type = other RNA
tgtgatattagctcatatga

SEQ ID NO: 1939 - RNA, 20 nt, synthetic construct
  source 1..20: mol_type = other RNA
tgtgatgtcgataaacatgc

SEQ ID NO: 1940 - RNA, 20 nt, synthetic construct
  source 1..20: mol_type = other RNA
tgtgatgtgggaatcaattt

SEQ ID NO: 1941 - RNA, 20 nt, synthetic construct
  source 1..20: mol_type = other RNA
tgtgattctaatacattcgt

SEQ ID NO: 1942 - RNA, 20 nt, synthetic construct
  source 1..20: mol_type = other RNA
tgtgattgtatgtttaatct

SEQ ID NO: 1943 - RNA, 20 nt, synthetic construct
  source 1..20: mol_type = other RNA
tgtgctgacgatttttagtt

SEQ ID NO: 1944 - RNA, 20 nt, synthetic construct
  source 1..20: mol_type = other RNA
tgtggcatcgagttaaagtt

SEQ ID NO: 1945 - RNA, 20 nt, synthetic construct
  source 1..20: mol_type = other RNA
tgtgggaatcaattttagat

SEQ ID NO: 1946 - RNA, 20 nt, synthetic construct
  source 1..20: mol_type = other RNA
tgtggtaaaaaatttgtatc

SEQ ID NO: 1947 - RNA, 20 nt, synthetic construct
  source 1..20: mol_type = other RNA
tgtggtcctgaaaattatag

SEQ ID NO: 1948 - RNA, 20 nt, synthetic construct
  source 1..20: mol_type = other RNA
tgtggtctaataatctggta

SEQ ID NO: 1949 - RNA, 20 nt, synthetic construct
  source 1..20: mol_type = other RNA
tgtgtaaaaatctgtaatac

SEQ ID NO: 1950 - RNA, 20 nt, synthetic construct
  source 1..20: mol_type = other RNA
tgttaaaactctaaacttga

SEQ ID NO: 1951 - RNA, 20 nt, synthetic construct
  source 1..20: mol_type = other RNA
tgttaaaggatatagtgccc

SEQ ID NO: 1952 - RNA, 20 nt, synthetic construct
  source 1..20: mol_type = other RNA
tgttaaagtcaatgtgactt

SEQ ID NO: 1953 - RNA, 20 nt, synthetic construct
  source 1..20: mol_type = other RNA
tgttacgaggtttatttcta

SEQ ID NO: 1954 - RNA, 20 nt, synthetic construct
  source 1..20: mol_type = other RNA
tgttcattcttactgtaatc

SEQ ID NO: 1955 - RNA, 20 nt, synthetic construct
  source 1..20: mol_type = other RNA
tgttccagaaaagtacaaaa

SEQ ID NO: 1956 - RNA, 20 nt, synthetic construct
  source 1..20: mol_type = other RNA
tgttgtagtattaatttcaa

SEQ ID NO: 1957 - RNA, 20 nt, synthetic construct
  source 1..20: mol_type = other RNA
tgttgtgatgtcgataaaca

SEQ ID NO: 1958 - RNA, 20 nt, synthetic construct
  source 1..20: mol_type = other RNA
tgtttaaacgttcagtaact

SEQ ID NO: 1959 - RNA, 20 nt, synthetic construct
  source 1..20: mol_type = other RNA
tgtttaaagacagcgaactt

SEQ ID NO: 1960 - RNA, 20 nt, synthetic construct
  source 1..20: mol_type = other RNA
tgtttaaattattgcctttt

SEQ ID NO: 1961 - RNA, 20 nt, synthetic construct
  source 1..20: mol_type = other RNA
tgtttaatcttaaatagaca

SEQ ID NO: 1962 - RNA, 20 nt, synthetic construct
  source 1..20: mol_type = other RNA
tgtttatcgacatcacaaca

SEQ ID NO: 1963 - RNA, 20 nt, synthetic construct
  source 1..20: mol_type = other RNA
tgttttaaattttgtgatgt

SEQ ID NO: 1964 - RNA, 20 nt, synthetic construct
  source 1..20: mol_type = other RNA
tgttttcatagtattaagtg

SEQ ID NO: 1965 - RNA, 20 nt, synthetic construct
  source 1..20: mol_type = other RNA
ttaaaaaactagtactcttg

SEQ ID NO: 1966 - RNA, 20 nt, synthetic construct
  source 1..20: mol_type = other RNA
ttaaaactctaaacttgact

SEQ ID NO: 1967 - RNA, 20 nt, synthetic construct
  source 1..20: mol_type = other RNA
ttaaaactgccagtaagaaa

SEQ ID NO: 1968 - RNA, 20 nt, synthetic construct
  source 1..20: mol_type = other RNA
ttaaaaggcatcatatgagc

SEQ ID NO: 1969 - RNA, 20 nt, synthetic construct
  source 1..20: mol_type = other RNA
ttaaaataagttcgctgtct

SEQ ID NO: 1970 - RNA, 20 nt, synthetic construct
  source 1..20: mol_type = other RNA
ttaaaatttcttactggcag

SEQ ID NO: 1971 - RNA, 20 nt, synthetic construct
  source 1..20: mol_type = other RNA
ttaaacaaatggagatgact

SEQ ID NO: 1972 - RNA, 20 nt, synthetic construct
  source 1..20: mol_type = other RNA
ttaaacagcctgacaagcat

SEQ ID NO: 1973 - RNA, 20 nt, synthetic construct
  source 1..20: mol_type = other RNA
ttaaacatacaatcacataa

SEQ ID NO: 1974 - RNA, 20 nt, synthetic construct
  source 1..20: mol_type = other RNA
ttaaacatatatacatgctt

SEQ ID NO: 1975 - RNA, 20 nt, synthetic construct
  source 1..20: mol_type = other RNA
ttaaacattaacctcattcc

SEQ ID NO: 1976 - RNA, 20 nt, synthetic construct
  source 1..20: mol_type = other RNA
ttaaacccatttgttaaagg

SEQ ID NO: 1977 - RNA, 20 nt, synthetic construct
  source 1..20: mol_type = other RNA
ttaaacgttcagtaacttgt

SEQ ID NO: 1978 - RNA, 20 nt, synthetic construct
  source 1..20: mol_type = other RNA
ttaaactgatgcttcatttt

SEQ ID NO: 1979 - RNA, 20 nt, synthetic construct
  source 1..20: mol_type = other RNA
ttaaactgggaaagttgtga

SEQ ID NO: 1980 - RNA, 20 nt, synthetic construct
  source 1..20: mol_type = other RNA
ttaaagaataccgtttacat

SEQ ID NO: 1981 - RNA, 20 nt, synthetic construct
  source 1..20: mol_type = other RNA
ttaaagacagcgaacttatt

SEQ ID NO: 1982 - RNA, 20 nt, synthetic construct
  source 1..20: mol_type = other RNA
ttaaaggatatagtgcccaa

SEQ ID NO: 1983 - RNA, 20 nt, synthetic construct
  source 1..20: mol_type = other RNA
ttaaagtcaatgtgacttag

SEQ ID NO: 1984 - RNA, 20 nt, synthetic construct
  source 1..20: mol_type = other RNA
ttaaagtcactgtctattta

SEQ ID NO: 1985 - RNA, 20 nt, synthetic construct
  source 1..20: mol_type = other RNA
ttaaagtttatatttcccct

SEQ ID NO: 1986 - RNA, 20 nt, synthetic construct
  source 1..20: mol_type = other RNA
ttaaatagacagtgacttta

SEQ ID NO: 1987 - RNA, 20 nt, synthetic construct
  source 1..20: mol_type = other RNA
ttaaatccttaagagaaagc

SEQ ID NO: 1988 - RNA, 20 nt, synthetic construct
  source 1..20: mol_type = other RNA
ttaaattaaacccatttgtt

SEQ ID NO: 1989 - RNA, 20 nt, synthetic construct
  source 1..20: mol_type = other RNA
ttaaattattcttgcatgtt

SEQ ID NO: 1990 - RNA, 20 nt, synthetic construct
  source 1..20: mol_type = other RNA
ttaaattttgtgatgtggga

SEQ ID NO: 1991 - RNA, 20 nt, synthetic construct
  source 1..20: mol_type = other RNA
ttaacaaataaggtatagtg

SEQ ID NO: 1992 - RNA, 20 nt, synthetic construct
  source 1..20: mol_type = other RNA
ttaacaaatgggtttaattt

SEQ ID NO: 1993 - RNA, 20 nt, synthetic construct
  source 1..20: mol_type = other RNA
ttaacaagagtactagtttt

SEQ ID NO: 1994 - RNA, 20 nt, synthetic construct
  source 1..20: mol_type = other RNA
ttaacacttaatactatgaa

SEQ ID NO: 1995 - RNA, 20 nt, synthetic construct
  source 1..20: mol_type = other RNA
ttaacatgaggtatcactat

SEQ ID NO: 1996 - RNA, 20 nt, synthetic construct
  source 1..20: mol_type = other RNA
ttaacctcattccaagttaa

SEQ ID NO: 1997 - RNA, 20 nt, synthetic construct
  source 1..20: mol_type = other RNA
ttaactcgatgccacaaata

SEQ ID NO: 1998 - RNA, 20 nt, synthetic construct
  source 1..20: mol_type = other RNA
ttaacttggaatgaggttaa

SEQ ID NO: 1999 - RNA, 20 nt, synthetic construct
  source 1..20: mol_type = other RNA
ttaagaactgtacaattacc

SEQ ID NO: 2000 - RNA, 20 nt, synthetic construct
  source 1..20: mol_type = other RNA
ttaagagaaagcttgagaaa

SEQ ID NO: 2001 - RNA, 20 nt, synthetic construct
  source 1..20: mol_type = other RNA
ttaagattaaacatacaatc

SEQ ID NO: 2002 - RNA, 20 nt, synthetic construct
  source 1..20: mol_type = other RNA
ttaaggatttaataccagat

SEQ ID NO: 2003 - RNA, 20 nt, synthetic construct
  source 1..20: mol_type = other RNA
ttaaggttatgtgattgtat

SEQ ID NO: 2004 - RNA, 20 nt, synthetic construct
  source 1..20: mol_type = other RNA
ttaataagttcacctattga

SEQ ID NO: 2005 - RNA, 20 nt, synthetic construct
  source 1..20: mol_type = other RNA
ttaataccagattattagac

SEQ ID NO: 2006 - RNA, 20 nt, synthetic construct
  source 1..20: mol_type = other RNA
ttaatactacaacatttaag

SEQ ID NO: 2007 - RNA, 20 nt, synthetic construct
  source 1..20: mol_type = other RNA
ttaatatatgagttgcttcc

SEQ ID NO: 2008 - RNA, 20 nt, synthetic construct
  source 1..20: mol_type = other RNA
ttaatcttaaatagacagtg

SEQ ID NO: 2009 - RNA, 20 nt, synthetic construct
  source 1..20: mol_type = other RNA
ttaatgtggtctaataatct

SEQ ID NO: 2010 - RNA, 20 nt, synthetic construct
  source 1..20: mol_type = other RNA
ttaatgtttaaattattgcc

SEQ ID NO: 2011 - RNA, 20 nt, synthetic construct
  source 1..20: mol_type = other RNA
ttaattctgcttcattaggt

SEQ ID NO: 2012 - RNA, 20 nt, synthetic construct
  source 1..20: mol_type = other RNA
ttaatttcgacagcttagtc

SEQ ID NO: 2013 - RNA, 20 nt, synthetic construct
  source 1..20: mol_type = other RNA
ttacacatactctgtgctga

SEQ ID NO: 2014 - RNA, 20 nt, synthetic construct
  source 1..20: mol_type = other RNA
ttacagatttttacacatac

SEQ ID NO: 2015 - RNA, 20 nt, synthetic construct
  source 1..20: mol_type = other RNA
ttacagtaagaatgaacata

SEQ ID NO: 2016 - RNA, 20 nt, synthetic construct
  source 1..20: mol_type = other RNA
ttacatttctcaatcaaaat

SEQ ID NO: 2017 - RNA, 20 nt, synthetic construct
  source 1..20: mol_type = other RNA
ttaccacagtatcacttgtc

SEQ ID NO: 2018 - RNA, 20 nt, synthetic construct
  source 1..20: mol_type = other RNA
ttaccagtcctctgtattta

SEQ ID NO: 2019 - RNA, 20 nt, synthetic construct
  source 1..20: mol_type = other RNA
ttacctttattattttgtac

SEQ ID NO: 2020 - RNA, 20 nt, synthetic construct
  source 1..20: mol_type = other RNA
ttacgaggtttatttctact

SEQ ID NO: 2021 - RNA, 20 nt, synthetic construct
  source 1..20: mol_type = other RNA
ttactccaaattattttgta

SEQ ID NO: 2022 - RNA, 20 nt, synthetic construct
  source 1..20: mol_type = other RNA
ttactgaacgtttaaacagc

SEQ ID NO: 2023 - RNA, 20 nt, synthetic construct
  source 1..20: mol_type = other RNA
ttactggcagttttaaaaaa

SEQ ID NO: 2024 - RNA, 20 nt, synthetic construct
  source 1..20: mol_type = other RNA
ttactgtaatctgacaagat

SEQ ID NO: 2025 - RNA, 20 nt, synthetic construct
  source 1..20: mol_type = other RNA
ttacttaggattcacataga

SEQ ID NO: 2026 - RNA, 20 nt, synthetic construct
  source 1..20: mol_type = other RNA
ttagaatcacagcatattta

SEQ ID NO: 2027 - RNA, 20 nt, synthetic construct
  source 1..20: mol_type = other RNA
ttagaccacattaacttgga

SEQ ID NO: 2028 - RNA, 20 nt, synthetic construct
  source 1..20: mol_type = other RNA
ttagagttttaacaagagta

SEQ ID NO: 2029 - RNA, 20 nt, synthetic construct
  source 1..20: mol_type = other RNA
ttagatacaaattttttacc

SEQ ID NO: 2030 - RNA, 20 nt, synthetic construct
  source 1..20: mol_type = other RNA
ttagatggtcacaatctaga

SEQ ID NO: 2031 - RNA, 20 nt, synthetic construct
  source 1..20: mol_type = other RNA
ttagcattatgtatttcaaa

SEQ ID NO: 2032 - RNA, 20 nt, synthetic construct
  source 1..20: mol_type = other RNA
ttagctcatatgatgccttt

SEQ ID NO: 2033 - RNA, 20 nt, synthetic construct
  source 1..20: mol_type = other RNA
ttaggattcacatagatcat

SEQ ID NO: 2034 - RNA, 20 nt, synthetic construct
  source 1..20: mol_type = other RNA
ttagggactgggtctttgtt

SEQ ID NO: 2035 - RNA, 20 nt, synthetic construct
  source 1..20: mol_type = other RNA
ttagggatctgttgtgatgt

SEQ ID NO: 2036 - RNA, 20 nt, synthetic construct
  source 1..20: mol_type = other RNA
ttagggatttagggatctgt

SEQ ID NO: 2037 - RNA, 20 nt, synthetic construct
  source 1..20: mol_type = other RNA
ttagggatttagggatttag

SEQ ID NO: 2038 - RNA, 20 nt, synthetic construct
  source 1..20: mol_type = other RNA
ttagggccagaataccaaaa

SEQ ID NO: 2039 - RNA, 20 nt, synthetic construct
  source 1..20: mol_type = other RNA
ttaggggaaatataaacttt

SEQ ID NO: 2040 - RNA, 20 nt, synthetic construct
  source 1..20: mol_type = other RNA
ttaggtttcataaataaatc

SEQ ID NO: 2041 - RNA, 20 nt, synthetic construct
  source 1..20: mol_type = other RNA
ttagtagtcatctccatttg

SEQ ID NO: 2042 - RNA, 20 nt, synthetic construct
  source 1..20: mol_type = other RNA
ttagtcaagtttagagtttt

SEQ ID NO: 2043 - RNA, 20 nt, synthetic construct
  source 1..20: mol_type = other RNA
ttagtctgtggtcctgaaaa

SEQ ID NO: 2044 - RNA, 20 nt, synthetic construct
  source 1..20: mol_type = other RNA
ttataagaattttgattgag

SEQ ID NO: 2045 - RNA, 20 nt, synthetic construct
  source 1..20: mol_type = other RNA
ttataatcaataggtgaact

SEQ ID NO: 2046 - RNA, 20 nt, synthetic construct
  source 1..20: mol_type = other RNA
ttataatctagattgtgacc

SEQ ID NO: 2047 - RNA, 20 nt, synthetic construct
  source 1..20: mol_type = other RNA
ttatatggtgacctaccttt

SEQ ID NO: 2048 - RNA, 20 nt, synthetic construct
  source 1..20: mol_type = other RNA
ttatatttcccctaaatatg

SEQ ID NO: 2049 - RNA, 20 nt, synthetic construct
  source 1..20: mol_type = other RNA
ttatccaatatacatgtcat

SEQ ID NO: 2050 - RNA, 20 nt, synthetic construct
  source 1..20: mol_type = other RNA
ttatcgacatcacaacagat

SEQ ID NO: 2051 - RNA, 20 nt, synthetic construct
  source 1..20: mol_type = other RNA
ttatcttaaagtcactgtct

SEQ ID NO: 2052 - RNA, 20 nt, synthetic construct
  source 1..20: mol_type = other RNA
ttatgaaacctaatgaagca

SEQ ID NO: 2053 - RNA, 20 nt, synthetic construct
  source 1..20: mol_type = other RNA
ttatgtatttcaaattatcc

SEQ ID NO: 2054 - RNA, 20 nt, synthetic construct
  source 1..20: mol_type = other RNA
ttatgtgattgtatgtttaa

SEQ ID NO: 2055 - RNA, 20 nt, synthetic construct
  source 1..20: mol_type = other RNA
ttattagaccacattaactt

SEQ ID NO: 2056 - RNA, 20 nt, synthetic construct
  source 1..20: mol_type = other RNA
ttattcttgcatgtttatcg

SEQ ID NO: 2057 - RNA, 20 nt, synthetic construct
  source 1..20: mol_type = other RNA
ttatttaataagttcaccta

SEQ ID NO: 2058 - RNA, 20 nt, synthetic construct
  source 1..20: mol_type = other RNA
ttatttaatatatgagttgc

SEQ ID NO: 2059 - RNA, 20 nt, synthetic construct
  source 1..20: mol_type = other RNA
ttatttatgaaacctaatga

SEQ ID NO: 2060 - RNA, 20 nt, synthetic construct
  source 1..20: mol_type = other RNA
ttatttctacttgaaaacct

SEQ ID NO: 2061 - RNA, 20 nt, synthetic construct
  source 1..20: mol_type = other RNA
ttattttaaaaggcatcata

SEQ ID NO: 2062 - RNA, 20 nt, synthetic construct
  source 1..20: mol_type = other RNA
ttattttgcatttgaaattg

SEQ ID NO: 2063 - RNA, 20 nt, synthetic construct
  source 1..20: mol_type = other RNA
ttattttgtacttttctgga

SEQ ID NO: 2064 - RNA, 20 nt, synthetic construct
  source 1..20: mol_type = other RNA
ttattttgtagcaaaatgaa

SEQ ID NO: 2065 - RNA, 20 nt, synthetic construct
  source 1..20: mol_type = other RNA
ttcaaaactaaaaatcgtca

SEQ ID NO: 2066 - RNA, 20 nt, synthetic construct
  source 1..20: mol_type = other RNA
ttcaaatgcaaaataattca

SEQ ID NO: 2067 - RNA, 20 nt, synthetic construct
  source 1..20: mol_type = other RNA
ttcaaattatccaatataca

SEQ ID NO: 2068 - RNA, 20 nt, synthetic construct
  source 1..20: mol_type = other RNA
ttcaagtagaaataaacctc

SEQ ID NO: 2069 - RNA, 20 nt, synthetic construct
  source 1..20: mol_type = other RNA
ttcaataaacaaagacccag

SEQ ID NO: 2070 - RNA, 20 nt, synthetic construct
  source 1..20: mol_type = other RNA
ttcacatagatcatacatat

SEQ ID NO: 2071 - RNA, 20 nt, synthetic construct
  source 1..20: mol_type = other RNA
ttcacctattgattataatc

SEQ ID NO: 2072 - RNA, 20 nt, synthetic construct
  source 1..20: mol_type = other RNA
ttcaggaccacagactaagc

SEQ ID NO: 2073 - RNA, 20 nt, synthetic construct
  source 1..20: mol_type = other RNA
ttcagtaacttgttacgagg

SEQ ID NO: 2074 - RNA, 20 nt, synthetic construct
  source 1..20: mol_type = other RNA
ttcatagtattaagtgttaa

SEQ ID NO: 2075 - RNA, 20 nt, synthetic construct
  source 1..20: mol_type = other RNA
ttcattaggtttcataaata

SEQ ID NO: 2076 - RNA, 20 nt, synthetic construct
  source 1..20: mol_type = other RNA
ttcattcttactgtaatctg

SEQ ID NO: 2077 - RNA, 20 nt, synthetic construct
  source 1..20: mol_type = other RNA
ttcattttgctacaaaataa

SEQ ID NO: 2078 - RNA, 20 nt, synthetic construct
  source 1..20: mol_type = other RNA
ttccaagttaatgtggtcta

SEQ ID NO: 2079 - RNA, 20 nt, synthetic construct
  source 1..20: mol_type = other RNA
ttccagaaaagtacaaaata

SEQ ID NO: 2080 - RNA, 20 nt, synthetic construct
  source 1..20: mol_type = other RNA
ttcccacatcacaaaattta

SEQ ID NO: 2081 - RNA, 20 nt, synthetic construct
  source 1..20: mol_type = other RNA
ttcccagtttaaaaaactag

SEQ ID NO: 2082 - RNA, 20 nt, synthetic construct
  source 1..20: mol_type = other RNA
ttcccccaaaattggacaat

SEQ ID NO: 2083 - RNA, 20 nt, synthetic construct
  source 1..20: mol_type = other RNA
ttcccctaaatatgctgtga

SEQ ID NO: 2084 - RNA, 20 nt, synthetic construct
  source 1..20: mol_type = other RNA
ttcctttacaattatttgtt

SEQ ID NO: 2085 - RNA, 20 nt, synthetic construct
  source 1..20: mol_type = other RNA
ttcgacagcttagtctgtgg

SEQ ID NO: 2086 - RNA, 20 nt, synthetic construct
  source 1..20: mol_type = other RNA
ttcgctgtctttaaacaaat

SEQ ID NO: 2087 - RNA, 20 nt, synthetic construct
  source 1..20: mol_type = other RNA
ttcgtgtaggttttcaagta

SEQ ID NO: 2088 - RNA, 20 nt, synthetic construct
  source 1..20: mol_type = other RNA
ttctaatacattcgtgtagg

SEQ ID NO: 2089 - RNA, 20 nt, synthetic construct
  source 1..20: mol_type = other RNA
ttctacttgaaaacctacac

SEQ ID NO: 2090 - RNA, 20 nt, synthetic construct
  source 1..20: mol_type = other RNA
ttctataatttagggactgg

SEQ ID NO: 2091 - RNA, 20 nt, synthetic construct
  source 1..20: mol_type = other RNA
ttctcaagctttctcttaag

SEQ ID NO: 2092 - RNA, 20 nt, synthetic construct
  source 1..20: mol_type = other RNA
ttctcaatcaaaattcttat

SEQ ID NO: 2093 - RNA, 20 nt, synthetic construct
  source 1..20: mol_type = other RNA
ttctcttaaggatttaatac

SEQ ID NO: 2094 - RNA, 20 nt, synthetic construct
  source 1..20: mol_type = other RNA
ttctgacaagtgatactgtg

SEQ ID NO: 2095 - RNA, 20 nt, synthetic construct
  source 1..20: mol_type = other RNA
ttctgcttcattaggtttca

SEQ ID NO: 2096 - RNA, 20 nt, synthetic construct
  source 1..20: mol_type = other RNA
ttctggaacaaaatatttac

SEQ ID NO: 2097 - RNA, 20 nt, synthetic construct
  source 1..20: mol_type = other RNA
ttcttaaatgttgtagtatt

SEQ ID NO: 2098 - RNA, 20 nt, synthetic construct
  source 1..20: mol_type = other RNA
ttcttactggcagttttaaa

SEQ ID NO: 2099 - RNA, 20 nt, synthetic construct
  source 1..20: mol_type = other RNA
ttcttactgtaatctgacaa

SEQ ID NO: 2100 - RNA, 20 nt, synthetic construct
  source 1..20: mol_type = other RNA
ttcttgcatgtttatcgaca

SEQ ID NO: 2101 - RNA, 20 nt, synthetic construct
  source 1..20: mol_type = other RNA
ttctttaaggttatgtgatt

SEQ ID NO: 2102 - RNA, 20 nt, synthetic construct
  source 1..20: mol_type = other RNA
ttgaaaacctacacgaatgt

SEQ ID NO: 2103 - RNA, 20 nt, synthetic construct
  source 1..20: mol_type = other RNA
ttgaaatacataatgctaag

SEQ ID NO: 2104 - RNA, 20 nt, synthetic construct
  source 1..20: mol_type = other RNA
ttgaaattaatactacaaca

SEQ ID NO: 2105 - RNA, 20 nt, synthetic construct
  source 1..20: mol_type = other RNA
ttgaaattgtccaattttgg

SEQ ID NO: 2106 - RNA, 20 nt, synthetic construct
  source 1..20: mol_type = other RNA
ttgacaaaggtaggtcacca

SEQ ID NO: 2107 - RNA, 20 nt, synthetic construct
  source 1..20: mol_type = other RNA
ttgactaaatacagaggact

SEQ ID NO: 2108 - RNA, 20 nt, synthetic construct
  source 1..20: mol_type = other RNA
ttgactttaacatgaggtat

SEQ ID NO: 2109 - RNA, 20 nt, synthetic construct
  source 1..20: mol_type = other RNA
ttgagaaatgtaaacggtat

SEQ ID NO: 2110 - RNA, 20 nt, synthetic construct
  source 1..20: mol_type = other RNA
ttgattataatctagattgt

SEQ ID NO: 2111 - RNA, 20 nt, synthetic construct
  source 1..20: mol_type = other RNA
ttgattcccacatcacaaaa

SEQ ID NO: 2112 - RNA, 20 nt, synthetic construct
  source 1..20: mol_type = other RNA
ttgattgagaaatgtaaacg

SEQ ID NO: 2113 - RNA, 20 nt, synthetic construct
  source 1..20: mol_type = other RNA
ttgcatgtttatcgacatca

SEQ ID NO: 2114 - RNA, 20 nt, synthetic construct
  source 1..20: mol_type = other RNA
ttgcatttgaaattgtccaa

SEQ ID NO: 2115 - RNA, 20 nt, synthetic construct
  source 1..20: mol_type = other RNA
ttgctacaaaataatttgga

SEQ ID NO: 2116 - RNA, 20 nt, synthetic construct
  source 1..20: mol_type = other RNA
ttggaatgaggttaatgttt

SEQ ID NO: 2117 - RNA, 20 nt, synthetic construct
  source 1..20: mol_type = other RNA
ttggacaatttcaaatgcaa

SEQ ID NO: 2118 - RNA, 20 nt, synthetic construct
  source 1..20: mol_type = other RNA
ttggagtaaatgtttgatat

SEQ ID NO: 2119 - RNA, 20 nt, synthetic construct
  source 1..20: mol_type = other RNA
ttggataatttgaaatacat

SEQ ID NO: 2120 - RNA, 20 nt, synthetic construct
  source 1..20: mol_type = other RNA
ttgggcactatatcctttaa

SEQ ID NO: 2121 - RNA, 20 nt, synthetic construct
  source 1..20: mol_type = other RNA
ttgggggaagagaggagcca

SEQ ID NO: 2122 - RNA, 20 nt, synthetic construct
  source 1..20: mol_type = other RNA
ttggtattctggccctaaaa

SEQ ID NO: 2123 - RNA, 20 nt, synthetic construct
  source 1..20: mol_type = other RNA
ttgtaaaggaatcttgtcag

SEQ ID NO: 2124 - RNA, 20 nt, synthetic construct
  source 1..20: mol_type = other RNA
ttgtacagttcttaaatgtt

SEQ ID NO: 2125 - RNA, 20 nt, synthetic construct
  source 1..20: mol_type = other RNA
ttgtacttttctggaacaaa

SEQ ID NO: 2126 - RNA, 20 nt, synthetic construct
  source 1..20: mol_type = other RNA
ttgtagcaaaatgaagcatc

SEQ ID NO: 2127 - RNA, 20 nt, synthetic construct
  source 1..20: mol_type = other RNA
ttgtatctaatctttaggga

SEQ ID NO: 2128 - RNA, 20 nt, synthetic construct
  source 1..20: mol_type = other RNA
ttgtattacagatttttaca

SEQ ID NO: 2129 - RNA, 20 nt, synthetic construct
  source 1..20: mol_type = other RNA
ttgtcaatacttagcattat

SEQ ID NO: 2130 - RNA, 20 nt, synthetic construct
  source 1..20: mol_type = other RNA
ttgtcagattacagtaagaa

SEQ ID NO: 2131 - RNA, 20 nt, synthetic construct
  source 1..20: mol_type = other RNA
ttgtcaggctgtttaaacgt

SEQ ID NO: 2132 - RNA, 20 nt, synthetic construct
  source 1..20: mol_type = other RNA
ttgtccaattttgggggaag

SEQ ID NO: 2133 - RNA, 20 nt, synthetic construct
  source 1..20: mol_type = other RNA
ttgtgaccatctaaaattga

SEQ ID NO: 2134 - RNA, 20 nt, synthetic construct
  source 1..20: mol_type = other RNA
ttgtgatattagctcatatg

SEQ ID NO: 2135 - RNA, 20 nt, synthetic construct
  source 1..20: mol_type = other RNA
ttgtgatgtcgataaacatg

SEQ ID NO: 2136 - RNA, 20 nt, synthetic construct
  source 1..20: mol_type = other RNA
ttgtgatgtgggaatcaatt

SEQ ID NO: 2137 - RNA, 20 nt, synthetic construct
  source 1..20: mol_type = other RNA
ttgtggcatcgagttaaagt

SEQ ID NO: 2138 - RNA, 20 nt, synthetic construct
  source 1..20: mol_type = other RNA
ttgttaaaactctaaacttg

SEQ ID NO: 2139 - RNA, 20 nt, synthetic construct
  source 1..20: mol_type = other RNA
ttgttaaaggatatagtgcc

SEQ ID NO: 2140 - RNA, 20 nt, synthetic construct
  source 1..20: mol_type = other RNA
ttgttacgaggtttatttct

SEQ ID NO: 2141 - RNA, 20 nt, synthetic construct
  source 1..20: mol_type = other RNA
ttgttccagaaaagtacaaa

SEQ ID NO: 2142 - RNA, 20 nt, synthetic construct
  source 1..20: mol_type = other RNA
ttgtttaaagacagcgaact

SEQ ID NO: 2143 - RNA, 20 nt, synthetic construct
  source 1..20: mol_type = other RNA
ttgttttaaattttgtgatg

SEQ ID NO: 2144 - RNA, 20 nt, synthetic construct
  source 1..20: mol_type = other RNA
ttgttttcatagtattaagt

SEQ ID NO: 2145 - RNA, 20 nt, synthetic construct
  source 1..20: mol_type = other RNA
tttaaaaaactagtactctt

SEQ ID NO: 2146 - RNA, 20 nt, synthetic construct
  source 1..20: mol_type = other RNA
tttaaaactgccagtaagaa

SEQ ID NO: 2147 - RNA, 20 nt, synthetic construct
  source 1..20: mol_type = other RNA
tttaaaaggcatcatatgag

SEQ ID NO: 2148 - RNA, 20 nt, synthetic construct
  source 1..20: mol_type = other RNA
tttaaaatttcttactggca

SEQ ID NO: 2149 - RNA, 20 nt, synthetic construct
  source 1..20: mol_type = other RNA
tttaaacaaatggagatgac

SEQ ID NO: 2150 - RNA, 20 nt, synthetic construct
  source 1..20: mol_type = other RNA
tttaaacagcctgacaagca

SEQ ID NO: 2151 - RNA, 20 nt, synthetic construct
  source 1..20: mol_type = other RNA
tttaaacatatatacatgct

SEQ ID NO: 2152 - RNA, 20 nt, synthetic construct
  source 1..20: mol_type = other RNA
tttaaacattaacctcattc

SEQ ID NO: 2153 - RNA, 20 nt, synthetic construct
  source 1..20: mol_type = other RNA
tttaaacgttcagtaacttg

SEQ ID NO: 2154 - RNA, 20 nt, synthetic construct
  source 1..20: mol_type = other RNA
tttaaactgatgcttcattt

SEQ ID NO: 2155 - RNA, 20 nt, synthetic construct
  source 1..20: mol_type = other RNA
tttaaactgggaaagttgtg

SEQ ID NO: 2156 - RNA, 20 nt, synthetic construct
  source 1..20: mol_type = other RNA
tttaaagacagcgaacttat

SEQ ID NO: 2157 - RNA, 20 nt, synthetic construct
  source 1..20: mol_type = other RNA
tttaaattaaacccatttgt

SEQ ID NO: 2158 - RNA, 20 nt, synthetic construct
  source 1..20: mol_type = other RNA
tttaaattattcttgcatgt

SEQ ID NO: 2159 - RNA, 20 nt, synthetic construct
  source 1..20: mol_type = other RNA
tttaaattttgtgatgtggg

SEQ ID NO: 2160 - RNA, 20 nt, synthetic construct
  source 1..20: mol_type = other RNA
tttaacaaataaggtatagt

SEQ ID NO: 2161 - RNA, 20 nt, synthetic construct
  source 1..20: mol_type = other RNA
tttaacaaatgggtttaatt

SEQ ID NO: 2162 - RNA, 20 nt, synthetic construct
  source 1..20: mol_type = other RNA
tttaacaagagtactagttt

SEQ ID NO: 2163 - RNA, 20 nt, synthetic construct
  source 1..20: mol_type = other RNA
tttaacacttaatactatga

SEQ ID NO: 2164 - RNA, 20 nt, synthetic construct
  source 1..20: mol_type = other RNA
tttaacatgaggtatcacta

SEQ ID NO: 2165 - RNA, 20 nt, synthetic construct
  source 1..20: mol_type = other RNA
tttaactcgatgccacaaat

SEQ ID NO: 2166 - RNA, 20 nt, synthetic construct
  source 1..20: mol_type = other RNA
tttaagaactgtacaattac

SEQ ID NO: 2167 - RNA, 20 nt, synthetic construct
  source 1..20: mol_type = other RNA
tttaaggttatgtgattgta

SEQ ID NO: 2168 - RNA, 20 nt, synthetic construct
  source 1..20: mol_type = other RNA
tttaataagttcacctattg

SEQ ID NO: 2169 - RNA, 20 nt, synthetic construct
  source 1..20: mol_type = other RNA
tttaataccagattattaga

SEQ ID NO: 2170 - RNA, 20 nt, synthetic construct
  source 1..20: mol_type = other RNA
tttaatatatgagttgcttc

SEQ ID NO: 2171 - RNA, 20 nt, synthetic construct
  source 1..20: mol_type = other RNA
tttaatcttaaatagacagt

SEQ ID NO: 2172 - RNA, 20 nt, synthetic construct
  source 1..20: mol_type = other RNA
tttaattctgcttcattagg

SEQ ID NO: 2173 - RNA, 20 nt, synthetic construct
  source 1..20: mol_type = other RNA
tttacacatactctgtgctg

SEQ ID NO: 2174 - RNA, 20 nt, synthetic construct
  source 1..20: mol_type = other RNA
tttacatttctcaatcaaaa

SEQ ID NO: 2175 - RNA, 20 nt, synthetic construct
  source 1..20: mol_type = other RNA
tttaccacagtatcacttgt

SEQ ID NO: 2176 - RNA, 20 nt, synthetic construct
  source 1..20: mol_type = other RNA
tttactccaaattattttgt

SEQ ID NO: 2177 - RNA, 20 nt, synthetic construct
  source 1..20: mol_type = other RNA
tttacttaggattcacatag

SEQ ID NO: 2178 - RNA, 20 nt, synthetic construct
  source 1..20: mol_type = other RNA
tttagagttttaacaagagt

SEQ ID NO: 2179 - RNA, 20 nt, synthetic construct
  source 1..20: mol_type = other RNA
tttagatggtcacaatctag

SEQ ID NO: 2180 - RNA, 20 nt, synthetic construct
  source 1..20: mol_type = other RNA
tttagggactgggtctttgt

SEQ ID NO: 2181 - RNA, 20 nt, synthetic construct
  source 1..20: mol_type = other RNA
tttagggatctgttgtgatg

SEQ ID NO: 2182 - RNA, 20 nt, synthetic construct
  source 1..20: mol_type = other RNA
tttagggatttagggatctg

SEQ ID NO: 2183 - RNA, 20 nt, synthetic construct
  source 1..20: mol_type = other RNA
tttagggatttagggattta

SEQ ID NO: 2184 - RNA, 20 nt, synthetic construct
  source 1..20: mol_type = other RNA
tttagggccagaataccaaa

SEQ ID NO: 2185 - RNA, 20 nt, synthetic construct
  source 1..20: mol_type = other RNA
tttaggggaaatataaactt

SEQ ID NO: 2186 - RNA, 20 nt, synthetic construct
  source 1..20: mol_type = other RNA
tttagtcaagtttagagttt

SEQ ID NO: 2187 - RNA, 20 nt, synthetic construct
  source 1..20: mol_type = other RNA
tttatatttcccctaaatat

SEQ ID NO: 2188 - RNA, 20 nt, synthetic construct
  source 1..20: mol_type = other RNA
tttatcgacatcacaacaga

SEQ ID NO: 2189 - RNA, 20 nt, synthetic construct
  source 1..20: mol_type = other RNA
tttatcttaaagtcactgtc

SEQ ID NO: 2190 - RNA, 20 nt, synthetic construct
  source 1..20: mol_type = other RNA
tttatgaaacctaatgaagc

SEQ ID NO: 2191 - RNA, 20 nt, synthetic construct
  source 1..20: mol_type = other RNA
tttatttatgaaacctaatg

SEQ ID NO: 2192 - RNA, 20 nt, synthetic construct
  source 1..20: mol_type = other RNA
tttatttctacttgaaaacc

SEQ ID NO: 2193 - RNA, 20 nt, synthetic construct
  source 1..20: mol_type = other RNA
tttattttaaaaggcatcat

SEQ ID NO: 2194 - RNA, 20 nt, synthetic construct
  source 1..20: mol_type = other RNA
tttcaaaactaaaaatcgtc

SEQ ID NO: 2195 - RNA, 20 nt, synthetic construct
  source 1..20: mol_type = other RNA
tttcaaatgcaaaataattc

SEQ ID NO: 2196 - RNA, 20 nt, synthetic construct
  source 1..20: mol_type = other RNA
tttcaaattatccaatatac

SEQ ID NO: 2197 - RNA, 20 nt, synthetic construct
  source 1..20: mol_type = other RNA
tttcaagtagaaataaacct

SEQ ID NO: 2198 - RNA, 20 nt, synthetic construct
  source 1..20: mol_type = other RNA
tttcaggaccacagactaag

SEQ ID NO: 2199 - RNA, 20 nt, synthetic construct
  source 1..20: mol_type = other RNA
tttcatagtattaagtgtta

SEQ ID NO: 2200 - RNA, 20 nt, synthetic construct
  source 1..20: mol_type = other RNA
tttcccagtttaaaaaacta

SEQ ID NO: 2201 - RNA, 20 nt, synthetic construct
  source 1..20: mol_type = other RNA
tttcccctaaatatgctgtg

SEQ ID NO: 2202 - RNA, 20 nt, synthetic construct
  source 1..20: mol_type = other RNA
tttcgacagcttagtctgtg

SEQ ID NO: 2203 - RNA, 20 nt, synthetic construct
  source 1..20: mol_type = other RNA
tttctacttgaaaacctaca

SEQ ID NO: 2204 - RNA, 20 nt, synthetic construct
  source 1..20: mol_type = other RNA
tttctataatttagggactg

SEQ ID NO: 2205 - RNA, 20 nt, synthetic construct
  source 1..20: mol_type = other RNA
tttctcaagctttctcttaa

SEQ ID NO: 2206 - RNA, 20 nt, synthetic construct
  source 1..20: mol_type = other RNA
tttctcaatcaaaattctta

SEQ ID NO: 2207 - RNA, 20 nt, synthetic construct
  source 1..20: mol_type = other RNA
tttctcttaaggatttaata

SEQ ID NO: 2208 - RNA, 20 nt, synthetic construct
  source 1..20: mol_type = other RNA
tttctggaacaaaatattta

SEQ ID NO: 2209 - RNA, 20 nt, synthetic construct
  source 1..20: mol_type = other RNA
tttcttactggcagttttaa

SEQ ID NO: 2210 - RNA, 20 nt, synthetic construct
  source 1..20: mol_type = other RNA
tttgaaatacataatgctaa

SEQ ID NO: 2211 - RNA, 20 nt, synthetic construct
  source 1..20: mol_type = other RNA
tttgaaattaatactacaac

SEQ ID NO: 2212 - RNA, 20 nt, synthetic construct
  source 1..20: mol_type = other RNA
tttgaaattgtccaattttg

SEQ ID NO: 2213 - RNA, 20 nt, synthetic construct
  source 1..20: mol_type = other RNA
tttgattgagaaatgtaaac

SEQ ID NO: 2214 - RNA, 20 nt, synthetic construct
  source 1..20: mol_type = other RNA
tttgcatttgaaattgtcca

SEQ ID NO: 2215 - RNA, 20 nt, synthetic construct
  source 1..20: mol_type = other RNA
tttgctacaaaataatttgg

SEQ ID NO: 2216 - RNA, 20 nt, synthetic construct
  source 1..20: mol_type = other RNA
tttggagtaaatgtttgata

SEQ ID NO: 2217 - RNA, 20 nt, synthetic construct
  source 1..20: mol_type = other RNA
tttgggggaagagaggagcc

SEQ ID NO: 2218 - RNA, 20 nt, synthetic construct
  source 1..20: mol_type = other RNA
tttggtattctggccctaaa

SEQ ID NO: 2219 - RNA, 20 nt, synthetic construct
  source 1..20: mol_type = other RNA
tttgtacttttctggaacaa

SEQ ID NO: 2220 - RNA, 20 nt, synthetic construct
  source 1..20: mol_type = other RNA
tttgtagcaaaatgaagcat

SEQ ID NO: 2221 - RNA, 20 nt, synthetic construct
  source 1..20: mol_type = other RNA
tttgtatctaatctttaggg

SEQ ID NO: 2222 - RNA, 20 nt, synthetic construct
  source 1..20: mol_type = other RNA
tttgtattacagatttttac

SEQ ID NO: 2223 - RNA, 20 nt, synthetic construct
  source 1..20: mol_type = other RNA
tttgtcaatacttagcatta

SEQ ID NO: 2224 - RNA, 20 nt, synthetic construct
  source 1..20: mol_type = other RNA
tttgtgatgtgggaatcaat

SEQ ID NO: 2225 - RNA, 20 nt, synthetic construct
  source 1..20: mol_type = other RNA
tttgtggcatcgagttaaag

SEQ ID NO: 2226 - RNA, 20 nt, synthetic construct
  source 1..20: mol_type = other RNA
tttgttaaaggatatagtgc

SEQ ID NO: 2227 - RNA, 20 nt, synthetic construct
  source 1..20: mol_type = other RNA
tttgttccagaaaagtacaa

SEQ ID NO: 2228 - RNA, 20 nt, synthetic construct
  source 1..20: mol_type = other RNA
tttgtttaaagacagcgaac

SEQ ID NO: 2229 - RNA, 20 nt, synthetic construct
  source 1..20: mol_type = other RNA
tttgttttcatagtattaag

SEQ ID NO: 2230 - RNA, 20 nt, synthetic construct
  source 1..20: mol_type = other RNA
ttttaaaactgccagtaaga

SEQ ID NO: 2231 - RNA, 20 nt, synthetic construct
  source 1..20: mol_type = other RNA
ttttaaaaggcatcatatga

SEQ ID NO: 2232 - RNA, 20 nt, synthetic construct
  source 1..20: mol_type = other RNA
ttttaaacatatatacatgc

SEQ ID NO: 2233 - RNA, 20 nt, synthetic construct
  source 1..20: mol_type = other RNA
ttttaaactgatgcttcatt

SEQ ID NO: 2234 - RNA, 20 nt, synthetic construct
  source 1..20: mol_type = other RNA
ttttaaactgggaaagttgt

SEQ ID NO: 2235 - RNA, 20 nt, synthetic construct
  source 1..20: mol_type = other RNA
ttttaaattaaacccatttg

SEQ ID NO: 2236 - RNA, 20 nt, synthetic construct
  source 1..20: mol_type = other RNA
ttttaaattttgtgatgtgg

SEQ ID NO: 2237 - RNA, 20 nt, synthetic construct
  source 1..20: mol_type = other RNA
ttttaacaaataaggtatag

SEQ ID NO: 2238 - RNA, 20 nt, synthetic construct
  source 1..20: mol_type = other RNA
ttttaacaagagtactagtt

SEQ ID NO: 2239 - RNA, 20 nt, synthetic construct
  source 1..20: mol_type = other RNA
ttttaacacttaatactatg

SEQ ID NO: 2240 - RNA, 20 nt, synthetic construct
  source 1..20: mol_type = other RNA
ttttacacatactctgtgct

SEQ ID NO: 2241 - RNA, 20 nt, synthetic construct
  source 1..20: mol_type = other RNA
ttttaccacagtatcacttg

SEQ ID NO: 2242 - RNA, 20 nt, synthetic construct
  source 1..20: mol_type = other RNA
ttttagatggtcacaatcta

SEQ ID NO: 2243 - RNA, 20 nt, synthetic construct
  source 1..20: mol_type = other RNA
ttttagggccagaataccaa

SEQ ID NO: 2244 - RNA, 20 nt, synthetic construct
  source 1..20: mol_type = other RNA
ttttatcttaaagtcactgt

SEQ ID NO: 2245 - RNA, 20 nt, synthetic construct
  source 1..20: mol_type = other RNA
ttttattttaaaaggcatca

SEQ ID NO: 2246 - RNA, 20 nt, synthetic construct
  source 1..20: mol_type = other RNA
ttttcaagtagaaataaacc

SEQ ID NO: 2247 - RNA, 20 nt, synthetic construct
  source 1..20: mol_type = other RNA
ttttcaggaccacagactaa

SEQ ID NO: 2248 - RNA, 20 nt, synthetic construct
  source 1..20: mol_type = other RNA
ttttcatagtattaagtgtt

SEQ ID NO: 2249 - RNA, 20 nt, synthetic construct
  source 1..20: mol_type = other RNA
ttttctggaacaaaatattt

SEQ ID NO: 2250 - RNA, 20 nt, synthetic construct
  source 1..20: mol_type = other RNA
ttttgattgagaaatgtaaa

SEQ ID NO: 2251 - RNA, 20 nt, synthetic construct
  source 1..20: mol_type = other RNA
ttttgcatttgaaattgtcc

SEQ ID NO: 2252 - RNA, 20 nt, synthetic construct
  source 1..20: mol_type = other RNA
ttttgctacaaaataatttg

SEQ ID NO: 2253 - RNA, 20 nt, synthetic construct
  source 1..20: mol_type = other RNA
ttttgggggaagagaggagc

SEQ ID NO: 2254 - RNA, 20 nt, synthetic construct
  source 1..20: mol_type = other RNA
ttttggtattctggccctaa

SEQ ID NO: 2255 - RNA, 20 nt, synthetic construct
  source 1..20: mol_type = other RNA
ttttgtacttttctggaaca

SEQ ID NO: 2256 - RNA, 20 nt, synthetic construct
  source 1..20: mol_type = other RNA
ttttgtagcaaaatgaagca

SEQ ID NO: 2257 - RNA, 20 nt, synthetic construct
  source 1..20: mol_type = other RNA
ttttgtgatgtgggaatcaa

SEQ ID NO: 2258 - RNA, 20 nt, synthetic construct
  source 1..20: mol_type = other RNA
ttttgttccagaaaagtaca

SEQ ID NO: 2259 - RNA, 20 nt, synthetic construct
  source 1..20: mol_type = other RNA
tttttaaaactgccagtaag

SEQ ID NO: 2260 - RNA, 20 nt, synthetic construct
  source 1..20: mol_type = other RNA
tttttaaactgatgcttcat

SEQ ID NO: 2261 - RNA, 20 nt, synthetic construct
  source 1..20: mol_type = other RNA
tttttaaactgggaaagttg

SEQ ID NO: 2262 - RNA, 20 nt, synthetic construct
  source 1..20: mol_type = other RNA
tttttacacatactctgtgc

SEQ ID NO: 2263 - RNA, 20 nt, synthetic construct
  source 1..20: mol_type = other RNA
tttttaccacagtatcactt

SEQ ID NO: 2264 - RNA, 20 nt, synthetic construct
  source 1..20: mol_type = other RNA
tttttagggccagaatacca

SEQ ID NO: 2265 - RNA, 20 nt, synthetic construct
  source 1..20: mol_type = other RNA
tttttatcttaaagtcactg

SEQ ID NO: 2266 - RNA, 20 nt, synthetic construct
  source 1..20: mol_type = other RNA
ttttttaaaactgccagtaa

SEQ ID NO: 2267 - RNA, 20 nt, synthetic construct
  source 1..20: mol_type = other RNA
ttttttaaactgggaaagtt

SEQ ID NO: 2268 - RNA, 20 nt, synthetic construct
  source 1..20: mol_type = other RNA
ttttttaccacagtatcact

SEQ ID NO: 2269 - RNA, 20 nt, synthetic construct
  source 1..20: mol_type = other RNA
ttttttagggccagaatacc

SEQ ID NO: 2270 - RNA, 20 nt, synthetic construct
  source 1..20: mol_type = other RNA
ttttttatcttaaagtcact

SEQ ID NO: 2271 - RNA, 21 nt, synthetic construct
  source 1..21: mol_type = other RNA
aaaaaactagtactcttgtta

SEQ ID NO: 2272 - RNA, 21 nt, synthetic construct
  source 1..21: mol_type = other RNA
aaaaaatcagcgttaatttcg

SEQ ID NO: 2273 - RNA, 21 nt, synthetic construct
  source 1..21: mol_type = other RNA
aaaaaatctatttctcaagct

SEQ ID NO: 2274 - RNA, 21 nt, synthetic construct
  source 1..21: mol_type = other RNA
aaaaactagtactcttgttaa

SEQ ID NO: 2275 - RNA, 21 nt, synthetic construct
  source 1..21: mol_type = other RNA
aaaaataaattctgacaagtg

SEQ ID NO: 2276 - RNA, 21 nt, synthetic construct
  source 1..21: mol_type = other RNA
aaaaatcagcgttaatttcga

SEQ ID NO: 2277 - RNA, 21 nt, synthetic construct
  source 1..21: mol_type = other RNA
aaaaatcgtcagcacagagta

SEQ ID NO: 2278 - RNA, 21 nt, synthetic construct
  source 1..21: mol_type = other RNA
aaaaatctatttctcaagctt

SEQ ID NO: 2279 - RNA, 21 nt, synthetic construct
  source 1..21: mol_type = other RNA
aaaacctacacgaatgtatta

SEQ ID NO: 2280 - RNA, 21 nt, synthetic construct
  source 1..21: mol_type = other RNA
aaaactaaaaatcgtcagcac

SEQ ID NO: 2281 - RNA, 21 nt, synthetic construct
  source 1..21: mol_type = other RNA
aaaactagtactcttgttaaa

SEQ ID NO: 2282 - RNA, 21 nt, synthetic construct
  source 1..21: mol_type = other RNA
aaaactctaaacttgactaaa

SEQ ID NO: 2283 - RNA, 21 nt, synthetic construct
  source 1..21: mol_type = other RNA
aaaactgccagtaagaaattt

SEQ ID NO: 2284 - RNA, 21 nt, synthetic construct
  source 1..21: mol_type = other RNA
aaaagatatgtatgatctatg

SEQ ID NO: 2285 - RNA, 21 nt, synthetic construct
  source 1..21: mol_type = other RNA
aaaaggcatcatatgagctaa

SEQ ID NO: 2286 - RNA, 21 nt, synthetic construct
  source 1..21: mol_type = other RNA
aaaataaattctgacaagtga

SEQ ID NO: 2287 - RNA, 21 nt, synthetic construct
  source 1..21: mol_type = other RNA
aaaataagttcgctgtcttta

SEQ ID NO: 2288 - RNA, 21 nt, synthetic construct
  source 1..21: mol_type = other RNA
aaaatcagcgttaatttcgac

SEQ ID NO: 2289 - RNA, 21 nt, synthetic construct
  source 1..21: mol_type = other RNA
aaaatcgtcagcacagagtat

SEQ ID NO: 2290 - RNA, 21 nt, synthetic construct
  source 1..21: mol_type = other RNA
aaaatctatttctcaagcttt

SEQ ID NO: 2291 - RNA, 21 nt, synthetic construct
  source 1..21: mol_type = other RNA
aaaatgaagcatcagtttaaa

SEQ ID NO: 2292 - RNA, 21 nt, synthetic construct
  source 1..21: mol_type = other RNA
aaaatggctcctctcttcccc

SEQ ID NO: 2293 - RNA, 21 nt, synthetic construct
  source 1..21: mol_type = other RNA
aaaattcaataaacaaagacc

SEQ ID NO: 2294 - RNA, 21 nt, synthetic construct
  source 1..21: mol_type = other RNA
aaaattgattcccacatcaca

SEQ ID NO: 2295 - RNA, 21 nt, synthetic construct
  source 1..21: mol_type = other RNA
aaaattggacaatttcaaatg

SEQ ID NO: 2296 - RNA, 21 nt, synthetic construct
  source 1..21: mol_type = other RNA
aaaatttcttactggcagttt

SEQ ID NO: 2297 - RNA, 21 nt, synthetic construct
  source 1..21: mol_type = other RNA
aaacaaagacccagtccctaa

SEQ ID NO: 2298 - RNA, 21 nt, synthetic construct
  source 1..21: mol_type = other RNA
aaacaaatggagatgactact

SEQ ID NO: 2299 - RNA, 21 nt, synthetic construct
  source 1..21: mol_type = other RNA
aaacagcctgacaagcatgta

SEQ ID NO: 2300 - RNA, 21 nt, synthetic construct
  source 1..21: mol_type = other RNA
aaacatacaatcacataacct

SEQ ID NO: 2301 - RNA, 21 nt, synthetic construct
  source 1..21: mol_type = other RNA
aaacatatatacatgcttgtc

SEQ ID NO: 2302 - RNA, 21 nt, synthetic construct
  source 1..21: mol_type = other RNA
aaacattaacctcattccaag

SEQ ID NO: 2303 - RNA, 21 nt, synthetic construct
  source 1..21: mol_type = other RNA
aaaccaaatagaggaagcaac

SEQ ID NO: 2304 - RNA, 21 nt, synthetic construct
  source 1..21: mol_type = other RNA
aaacccatttgttaaaggata

SEQ ID NO: 2305 - RNA, 21 nt, synthetic construct
  source 1..21: mol_type = other RNA
aaacctaatgaagcagaatta

SEQ ID NO: 2306 - RNA, 21 nt, synthetic construct
  source 1..21: mol_type = other RNA
aaacctacacgaatgtattag

SEQ ID NO: 2307 - RNA, 21 nt, synthetic construct
  source 1..21: mol_type = other RNA
aaacctcgtaacaagttactg

SEQ ID NO: 2308 - RNA, 21 nt, synthetic construct
  source 1..21: mol_type = other RNA
aaacggtattctttaaggtta

SEQ ID NO: 2309 - RNA, 21 nt, synthetic construct
  source 1..21: mol_type = other RNA
aaacgttcagtaacttgttac

SEQ ID NO: 2310 - RNA, 21 nt, synthetic construct
  source 1..21: mol_type = other RNA
aaactaaaaatcgtcagcaca

SEQ ID NO: 2311 - RNA, 21 nt, synthetic construct
  source 1..21: mol_type = other RNA
aaactagtactcttgttaaaa

SEQ ID NO: 2312 - RNA, 21 nt, synthetic construct
  source 1..21: mol_type = other RNA
aaactctaaacttgactaaat

SEQ ID NO: 2313 - RNA, 21 nt, synthetic construct
  source 1..21: mol_type = other RNA
aaactgatgcttcattttgct

SEQ ID NO: 2314 - RNA, 21 nt, synthetic construct
  source 1..21: mol_type = other RNA
aaactgccagtaagaaatttt

SEQ ID NO: 2315 - RNA, 21 nt, synthetic construct
  source 1..21: mol_type = other RNA
aaactgggaaagttgtgatat

SEQ ID NO: 2316 - RNA, 21 nt, synthetic construct
  source 1..21: mol_type = other RNA
aaacttgactaaatacagagg

SEQ ID NO: 2317 - RNA, 21 nt, synthetic construct
  source 1..21: mol_type = other RNA
aaactttaactcgatgccaca

SEQ ID NO: 2318 - RNA, 21 nt, synthetic construct
  source 1..21: mol_type = other RNA
aaagaataccgtttacatttc

SEQ ID NO: 2319 - RNA, 21 nt, synthetic construct
  source 1..21: mol_type = other RNA
aaagacagcgaacttatttta

SEQ ID NO: 2320 - RNA, 21 nt, synthetic construct
  source 1..21: mol_type = other RNA
aaagacccagtccctaaatta

SEQ ID NO: 2321 - RNA, 21 nt, synthetic construct
  source 1..21: mol_type = other RNA
aaagatatgtatgatctatgt

SEQ ID NO: 2322 - RNA, 21 nt, synthetic construct
  source 1..21: mol_type = other RNA
aaagcttgagaaatagatttt

SEQ ID NO: 2323 - RNA, 21 nt, synthetic construct
  source 1..21: mol_type = other RNA
aaaggaatcttgtcagattac

SEQ ID NO: 2324 - RNA, 21 nt, synthetic construct
  source 1..21: mol_type = other RNA
aaaggatatagtgcccaagtt

SEQ ID NO: 2325 - RNA, 21 nt, synthetic construct
  source 1..21: mol_type = other RNA
aaaggcatcatatgagctaat

SEQ ID NO: 2326 - RNA, 21 nt, synthetic construct
  source 1..21: mol_type = other RNA
aaaggtaggtcaccatataac

SEQ ID NO: 2327 - RNA, 21 nt, synthetic construct
  source 1..21: mol_type = other RNA
aaagtcaatgtgacttagtag

SEQ ID NO: 2328 - RNA, 21 nt, synthetic construct
  source 1..21: mol_type = other RNA
aaagtcactgtctatttaaga

SEQ ID NO: 2329 - RNA, 21 nt, synthetic construct
  source 1..21: mol_type = other RNA
aaagttgtgatattagctcat

SEQ ID NO: 2330 - RNA, 21 nt, synthetic construct
  source 1..21: mol_type = other RNA
aaagtttatatttcccctaaa

SEQ ID NO: 2331 - RNA, 21 nt, synthetic construct
  source 1..21: mol_type = other RNA
aaataaacctcgtaacaagtt

SEQ ID NO: 2332 - RNA, 21 nt, synthetic construct
  source 1..21: mol_type = other RNA
aaataaattctgacaagtgat

SEQ ID NO: 2333 - RNA, 21 nt, synthetic construct
  source 1..21: mol_type = other RNA
aaataaggtatagtgatacct

SEQ ID NO: 2334 - RNA, 21 nt, synthetic construct
  source 1..21: mol_type = other RNA
aaataagttcgctgtctttaa

SEQ ID NO: 2335 - RNA, 21 nt, synthetic construct
  source 1..21: mol_type = other RNA
aaatacagaggactggtaatt

SEQ ID NO: 2336 - RNA, 21 nt, synthetic construct
  source 1..21: mol_type = other RNA
aaatagacagtgactttaaga

SEQ ID NO: 2337 - RNA, 21 nt, synthetic construct
  source 1..21: mol_type = other RNA
aaatagaggaagcaactcata

SEQ ID NO: 2338 - RNA, 21 nt, synthetic construct
  source 1..21: mol_type = other RNA
aaatatgctgtgattctaata

SEQ ID NO: 2339 - RNA, 21 nt, synthetic construct
  source 1..21: mol_type = other RNA
aaatatgttcattcttactgt

SEQ ID NO: 2340 - RNA, 21 nt, synthetic construct
  source 1..21: mol_type = other RNA
aaatatttacttaggattcac

SEQ ID NO: 2341 - RNA, 21 nt, synthetic construct
  source 1..21: mol_type = other RNA
aaatattttgttccagaaaag

SEQ ID NO: 2342 - RNA, 21 nt, synthetic construct
  source 1..21: mol_type = other RNA
aaatcagcgttaatttcgaca

SEQ ID NO: 2343 - RNA, 21 nt, synthetic construct
  source 1..21: mol_type = other RNA
aaatccctaaagattagatac

SEQ ID NO: 2344 - RNA, 21 nt, synthetic construct
  source 1..21: mol_type = other RNA
aaatccctaaatccctaaaga

SEQ ID NO: 2345 - RNA, 21 nt, synthetic construct
  source 1..21: mol_type = other RNA
aaatccttaagagaaagcttg

SEQ ID NO: 2346 - RNA, 21 nt, synthetic construct
  source 1..21: mol_type = other RNA
aaatcgtcagcacagagtatg

SEQ ID NO: 2347 - RNA, 21 nt, synthetic construct
  source 1..21: mol_type = other RNA
aaatctatttctcaagctttc

SEQ ID NO: 2348 - RNA, 21 nt, synthetic construct
  source 1..21: mol_type = other RNA
aaatgaagcatcagtttaaaa

SEQ ID NO: 2349 - RNA, 21 nt, synthetic construct
  source 1..21: mol_type = other RNA
aaatggagatgactactaagt

SEQ ID NO: 2350 - RNA, 21 nt, synthetic construct
  source 1..21: mol_type = other RNA
aaatggctcctctcttccccc

SEQ ID NO: 2351 - RNA, 21 nt, synthetic construct
  source 1..21: mol_type = other RNA
aaatgtaaacggtattcttta

SEQ ID NO: 2352 - RNA, 21 nt, synthetic construct
  source 1..21: mol_type = other RNA
aaattatccaatatacatgtc

SEQ ID NO: 2353 - RNA, 21 nt, synthetic construct
  source 1..21: mol_type = other RNA
aaattcaataaacaaagaccc

SEQ ID NO: 2354 - RNA, 21 nt, synthetic construct
  source 1..21: mol_type = other RNA
aaattctgacaagtgatactg

SEQ ID NO: 2355 - RNA, 21 nt, synthetic construct
  source 1..21: mol_type = other RNA
aaattgattcccacatcacaa

SEQ ID NO: 2356 - RNA, 21 nt, synthetic construct
  source 1..21: mol_type = other RNA
aaattggacaatttcaaatgc

SEQ ID NO: 2357 - RNA, 21 nt, synthetic construct
  source 1..21: mol_type = other RNA
aaattgtccaattttggggga

SEQ ID NO: 2358 - RNA, 21 nt, synthetic construct
  source 1..21: mol_type = other RNA
aaatttctataatttagggac

SEQ ID NO: 2359 - RNA, 21 nt, synthetic construct
  source 1..21: mol_type = other RNA
aaatttcttactggcagtttt

SEQ ID NO: 2360 - RNA, 21 nt, synthetic construct
  source 1..21: mol_type = other RNA
aaattttgtgatgtgggaatc

SEQ ID NO: 2361 - RNA, 21 nt, synthetic construct
  source 1..21: mol_type = other RNA
aaatttttaaactgatgcttc

SEQ ID NO: 2362 - RNA, 21 nt, synthetic construct
  source 1..21: mol_type = other RNA
aaattttttaccacagtatca

SEQ ID NO: 2363 - RNA, 21 nt, synthetic construct
  source 1..21: mol_type = other RNA
aacaaagacccagtccctaaa

SEQ ID NO: 2364 - RNA, 21 nt, synthetic construct
  source 1..21: mol_type = other RNA
aacaaataaggtatagtgata

SEQ ID NO: 2365 - RNA, 21 nt, synthetic construct
  source 1..21: mol_type = other RNA
aacaaatggagatgactacta

SEQ ID NO: 2366 - RNA, 21 nt, synthetic construct
  source 1..21: mol_type = other RNA
aacaagagtactagtttttta

SEQ ID NO: 2367 - RNA, 21 nt, synthetic construct
  source 1..21: mol_type = other RNA
aacaagttactgaacgtttaa

SEQ ID NO: 2368 - RNA, 21 nt, synthetic construct
  source 1..21: mol_type = other RNA
aacacttaatactatgaaaac

SEQ ID NO: 2369 - RNA, 21 nt, synthetic construct
  source 1..21: mol_type = other RNA
aacagatccctaaatccctaa

SEQ ID NO: 2370 - RNA, 21 nt, synthetic construct
  source 1..21: mol_type = other RNA
aacagcctgacaagcatgtat

SEQ ID NO: 2371 - RNA, 21 nt, synthetic construct
  source 1..21: mol_type = other RNA
aacatacaatcacataacctt

SEQ ID NO: 2372 - RNA, 21 nt, synthetic construct
  source 1..21: mol_type = other RNA
aacatatatacatgcttgtca

SEQ ID NO: 2373 - RNA, 21 nt, synthetic construct
  source 1..21: mol_type = other RNA
aacatatttgtggcatcgagt

SEQ ID NO: 2374 - RNA, 21 nt, synthetic construct
  source 1..21: mol_type = other RNA
aacatgaggtatcactatacc

SEQ ID NO: 2375 - RNA, 21 nt, synthetic construct
  source 1..21: mol_type = other RNA
aacattaacctcattccaagt

SEQ ID NO: 2376 - RNA, 21 nt, synthetic construct
  source 1..21: mol_type = other RNA
aacatttaagaactgtacaat

SEQ ID NO: 2377 - RNA, 21 nt, synthetic construct
  source 1..21: mol_type = other RNA
aaccaaatagaggaagcaact

SEQ ID NO: 2378 - RNA, 21 nt, synthetic construct
  source 1..21: mol_type = other RNA
aacccatttgttaaaggatat

SEQ ID NO: 2379 - RNA, 21 nt, synthetic construct
  source 1..21: mol_type = other RNA
aacctaatgaagcagaattaa

SEQ ID NO: 2380 - RNA, 21 nt, synthetic construct
  source 1..21: mol_type = other RNA
aacctacacgaatgtattaga

SEQ ID NO: 2381 - RNA, 21 nt, synthetic construct
  source 1..21: mol_type = other RNA
aacctcattccaagttaatgt

SEQ ID NO: 2382 - RNA, 21 nt, synthetic construct
  source 1..21: mol_type = other RNA
aacctcgtaacaagttactga

SEQ ID NO: 2383 - RNA, 21 nt, synthetic construct
  source 1..21: mol_type = other RNA
aaccttaaagaataccgttta

SEQ ID NO: 2384 - RNA, 21 nt, synthetic construct
  source 1..21: mol_type = other RNA
aacggtattctttaaggttat

SEQ ID NO: 2385 - RNA, 21 nt, synthetic construct
  source 1..21: mol_type = other RNA
aacgttcagtaacttgttacg

SEQ ID NO: 2386 - RNA, 21 nt, synthetic construct
  source 1..21: mol_type = other RNA
aacgtttaaacagcctgacaa

SEQ ID NO: 2387 - RNA, 21 nt, synthetic construct
  source 1..21: mol_type = other RNA
aactaaaaatcgtcagcacag

SEQ ID NO: 2388 - RNA, 21 nt, synthetic construct
  source 1..21: mol_type = other RNA
aactagtactcttgttaaaac

SEQ ID NO: 2389 - RNA, 21 nt, synthetic construct
  source 1..21: mol_type = other RNA
aactcgatgccacaaatatgt

SEQ ID NO: 2390 - RNA, 21 nt, synthetic construct
  source 1..21: mol_type = other RNA
aactctaaacttgactaaata

SEQ ID NO: 2391 - RNA, 21 nt, synthetic construct
  source 1..21: mol_type = other RNA
aactgaggcaaatttaaaagg

SEQ ID NO: 2392 - RNA, 21 nt, synthetic construct
  source 1..21: mol_type = other RNA
aactgatgcttcattttgcta

SEQ ID NO: 2393 - RNA, 21 nt, synthetic construct
  source 1..21: mol_type = other RNA
aactgccagtaagaaatttta

SEQ ID NO: 2394 - RNA, 21 nt, synthetic construct
  source 1..21: mol_type = other RNA
aactgggaaagttgtgatatt

SEQ ID NO: 2395 - RNA, 21 nt, synthetic construct
  source 1..21: mol_type = other RNA
aactgtacaattaccagtcct

SEQ ID NO: 2396 - RNA, 21 nt, synthetic construct
  source 1..21: mol_type = other RNA
aacttgactaaatacagagga

SEQ ID NO: 2397 - RNA, 21 nt, synthetic construct
  source 1..21: mol_type = other RNA
aacttggaatgaggttaatgt

SEQ ID NO: 2398 - RNA, 21 nt, synthetic construct
  source 1..21: mol_type = other RNA
aacttgggcactatatccttt

SEQ ID NO: 2399 - RNA, 21 nt, synthetic construct
  source 1..21: mol_type = other RNA
aacttgttacgaggtttattt

SEQ ID NO: 2400 - RNA, 21 nt, synthetic construct
  source 1..21: mol_type = other RNA
aactttaactcgatgccacaa

SEQ ID NO: 2401 - RNA, 21 nt, synthetic construct
  source 1..21: mol_type = other RNA
aactttcccagtttaaaaaac

SEQ ID NO: 2402 - RNA, 21 nt, synthetic construct
  source 1..21: mol_type = other RNA
aagaactgtacaattaccagt

SEQ ID NO: 2403 - RNA, 21 nt, synthetic construct
  source 1..21: mol_type = other RNA
aagaataccgtttacatttct

SEQ ID NO: 2404 - RNA, 21 nt, synthetic construct
  source 1..21: mol_type = other RNA
aagaatgaacatatttgtggc

SEQ ID NO: 2405 - RNA, 21 nt, synthetic construct
  source 1..21: mol_type = other RNA
aagaattttgattgagaaatg

SEQ ID NO: 2406 - RNA, 21 nt, synthetic construct
  source 1..21: mol_type = other RNA
aagacagcgaacttattttaa

SEQ ID NO: 2407 - RNA, 21 nt, synthetic construct
  source 1..21: mol_type = other RNA
aagacccagtccctaaattat

SEQ ID NO: 2408 - RNA, 21 nt, synthetic construct
  source 1..21: mol_type = other RNA
aagagaaagcttgagaaatag

SEQ ID NO: 2409 - RNA, 21 nt, synthetic construct
  source 1..21: mol_type = other RNA
aagagaggagccattttggta

SEQ ID NO: 2410 - RNA, 21 nt, synthetic construct
  source 1..21: mol_type = other RNA
aagagtactagttttttaaac

SEQ ID NO: 2411 - RNA, 21 nt, synthetic construct
  source 1..21: mol_type = other RNA
aagatatgtatgatctatgtg

SEQ ID NO: 2412 - RNA, 21 nt, synthetic construct
  source 1..21: mol_type = other RNA
aagattaaacatacaatcaca

SEQ ID NO: 2413 - RNA, 21 nt, synthetic construct
  source 1..21: mol_type = other RNA
aagcagaattaaatactgtat

SEQ ID NO: 2414 - RNA, 21 nt, synthetic construct
  source 1..21: mol_type = other RNA
aagcatcagtttaaaaatttg

SEQ ID NO: 2415 - RNA, 21 nt, synthetic construct
  source 1..21: mol_type = other RNA
aagctgtcgaaattaacgctg

SEQ ID NO: 2416 - RNA, 21 nt, synthetic construct
  source 1..21: mol_type = other RNA
aagcttgagaaatagattttt

SEQ ID NO: 2417 - RNA, 21 nt, synthetic construct
  source 1..21: mol_type = other RNA
aagctttctcttaaggattta

SEQ ID NO: 2418 - RNA, 21 nt, synthetic construct
  source 1..21: mol_type = other RNA
aaggaatcttgtcagattaca

SEQ ID NO: 2419 - RNA, 21 nt, synthetic construct
  source 1..21: mol_type = other RNA
aaggatatagtgcccaagtta

SEQ ID NO: 2420 - RNA, 21 nt, synthetic construct
  source 1..21: mol_type = other RNA
aaggatttaataccagattat

SEQ ID NO: 2421 - RNA, 21 nt, synthetic construct
  source 1..21: mol_type = other RNA
aaggcatcatatgagctaata

SEQ ID NO: 2422 - RNA, 21 nt, synthetic construct
  source 1..21: mol_type = other RNA
aaggtaggtcaccatataact

SEQ ID NO: 2423 - RNA, 21 nt, synthetic construct
  source 1..21: mol_type = other RNA
aaggtatagtgatacctcatg

SEQ ID NO: 2424 - RNA, 21 nt, synthetic construct
  source 1..21: mol_type = other RNA
aaggttatgtgattgtatgtt

SEQ ID NO: 2425 - RNA, 21 nt, synthetic construct
  source 1..21: mol_type = other RNA
aagtaaatattttgttccaga

SEQ ID NO: 2426 - RNA, 21 nt, synthetic construct
  source 1..21: mol_type = other RNA
aagtagaaataaacctcgtaa

SEQ ID NO: 2427 - RNA, 21 nt, synthetic construct
  source 1..21: mol_type = other RNA
aagtattgacaaaggtaggtc

SEQ ID NO: 2428 - RNA, 21 nt, synthetic construct
  source 1..21: mol_type = other RNA
aagtcaatgtgacttagtagt

SEQ ID NO: 2429 - RNA, 21 nt, synthetic construct
  source 1..21: mol_type = other RNA
aagtcacattgactttaacat

SEQ ID NO: 2430 - RNA, 21 nt, synthetic construct
  source 1..21: mol_type = other RNA
aagtcactgtctatttaagat

SEQ ID NO: 2431 - RNA, 21 nt, synthetic construct
  source 1..21: mol_type = other RNA
aagtgatactgtggtaaaaaa

SEQ ID NO: 2432 - RNA, 21 nt, synthetic construct
  source 1..21: mol_type = other RNA
aagttaatgtggtctaataat

SEQ ID NO: 2433 - RNA, 21 nt, synthetic construct
  source 1..21: mol_type = other RNA
aagttactgaacgtttaaaca

SEQ ID NO: 2434 - RNA, 21 nt, synthetic construct
  source 1..21: mol_type = other RNA
aagttatatggtgacctacct

SEQ ID NO: 2435 - RNA, 21 nt, synthetic construct
  source 1..21: mol_type = other RNA
aagttatttaataagttcacc

SEQ ID NO: 2436 - RNA, 21 nt, synthetic construct
  source 1..21: mol_type = other RNA
aagttcacctattgattataa

SEQ ID NO: 2437 - RNA, 21 nt, synthetic construct
  source 1..21: mol_type = other RNA
aagttcgctgtctttaaacaa

SEQ ID NO: 2438 - RNA, 21 nt, synthetic construct
  source 1..21: mol_type = other RNA
aagttgtgatattagctcata

SEQ ID NO: 2439 - RNA, 21 nt, synthetic construct
  source 1..21: mol_type = other RNA
aagtttagagttttaacaaga

SEQ ID NO: 2440 - RNA, 21 nt, synthetic construct
  source 1..21: mol_type = other RNA
aagtttatatttcccctaaat

SEQ ID NO: 2441 - RNA, 21 nt, synthetic construct
  source 1..21: mol_type = other RNA
aataaacaaagacccagtccc

SEQ ID NO: 2442 - RNA, 21 nt, synthetic construct
  source 1..21: mol_type = other RNA
aataaacctcgtaacaagtta

SEQ ID NO: 2443 - RNA, 21 nt, synthetic construct
  source 1..21: mol_type = other RNA
aataaattctgacaagtgata

SEQ ID NO: 2444 - RNA, 21 nt, synthetic construct
  source 1..21: mol_type = other RNA
aataaggtatagtgatacctc

SEQ ID NO: 2445 - RNA, 21 nt, synthetic construct
  source 1..21: mol_type = other RNA
aataagttcacctattgatta

SEQ ID NO: 2446 - RNA, 21 nt, synthetic construct
  source 1..21: mol_type = other RNA
aataagttcgctgtctttaaa

SEQ ID NO: 2447 - RNA, 21 nt, synthetic construct
  source 1..21: mol_type = other RNA
aataatctggtattaaatcct

SEQ ID NO: 2448 - RNA, 21 nt, synthetic construct
  source 1..21: mol_type = other RNA
aataattgtaaaggaatcttg

SEQ ID NO: 2449 - RNA, 21 nt, synthetic construct
  source 1..21: mol_type = other RNA
aatacagaggactggtaattg

SEQ ID NO: 2450 - RNA, 21 nt, synthetic construct
  source 1..21: mol_type = other RNA
aatacagtatttaattctgct

SEQ ID NO: 2451 - RNA, 21 nt, synthetic construct
  source 1..21: mol_type = other RNA
aatacataatgctaagtattg

SEQ ID NO: 2452 - RNA, 21 nt, synthetic construct
  source 1..21: mol_type = other RNA
aatacattcgtgtaggttttc

SEQ ID NO: 2453 - RNA, 21 nt, synthetic construct
  source 1..21: mol_type = other RNA
aataccaaaatggctcctctc

SEQ ID NO: 2454 - RNA, 21 nt, synthetic construct
  source 1..21: mol_type = other RNA
aataccagattattagaccac

SEQ ID NO: 2455 - RNA, 21 nt, synthetic construct
  source 1..21: mol_type = other RNA
aataccgtttacatttctcaa

SEQ ID NO: 2456 - RNA, 21 nt, synthetic construct
  source 1..21: mol_type = other RNA
aatactacaacatttaagaac

SEQ ID NO: 2457 - RNA, 21 nt, synthetic construct
  source 1..21: mol_type = other RNA
aatagacagtgactttaagat

SEQ ID NO: 2458 - RNA, 21 nt, synthetic construct
  source 1..21: mol_type = other RNA
aatagaggaagcaactcatat

SEQ ID NO: 2459 - RNA, 21 nt, synthetic construct
  source 1..21: mol_type = other RNA
aatataaactttaactcgatg

SEQ ID NO: 2460 - RNA, 21 nt, synthetic construct
  source 1..21: mol_type = other RNA
aatatatgagttgcttcctct

SEQ ID NO: 2461 - RNA, 21 nt, synthetic construct
  source 1..21: mol_type = other RNA
aatatcacaactttcccagtt

SEQ ID NO: 2462 - RNA, 21 nt, synthetic construct
  source 1..21: mol_type = other RNA
aatatgctgtgattctaatac

SEQ ID NO: 2463 - RNA, 21 nt, synthetic construct
  source 1..21: mol_type = other RNA
aatatgttcattcttactgta

SEQ ID NO: 2464 - RNA, 21 nt, synthetic construct
  source 1..21: mol_type = other RNA
aatatttacttaggattcaca

SEQ ID NO: 2465 - RNA, 21 nt, synthetic construct
  source 1..21: mol_type = other RNA
aatattttgttccagaaaagt

SEQ ID NO: 2466 - RNA, 21 nt, synthetic construct
  source 1..21: mol_type = other RNA
aatcaataggtgaacttatta

SEQ ID NO: 2467 - RNA, 21 nt, synthetic construct
  source 1..21: mol_type = other RNA
aatcaattttagatggtcaca

SEQ ID NO: 2468 - RNA, 21 nt, synthetic construct
  source 1..21: mol_type = other RNA
aatcacagcatatttagggga

SEQ ID NO: 2469 - RNA, 21 nt, synthetic construct
  source 1..21: mol_type = other RNA
aatcacataaccttaaagaat

SEQ ID NO: 2470 - RNA, 21 nt, synthetic construct
  source 1..21: mol_type = other RNA
aatcagcgttaatttcgacag

SEQ ID NO: 2471 - RNA, 21 nt, synthetic construct
  source 1..21: mol_type = other RNA
aatcatatcaaacatttactc

SEQ ID NO: 2472 - RNA, 21 nt, synthetic construct
  source 1..21: mol_type = other RNA
aatccctaaagattagataca

SEQ ID NO: 2473 - RNA, 21 nt, synthetic construct
  source 1..21: mol_type = other RNA
aatccctaaatccctaaagat

SEQ ID NO: 2474 - RNA, 21 nt, synthetic construct
  source 1..21: mol_type = other RNA
aatccttaagagaaagcttga

SEQ ID NO: 2475 - RNA, 21 nt, synthetic construct
  source 1..21: mol_type = other RNA
aatcgtcagcacagagtatgt

SEQ ID NO: 2476 - RNA, 21 nt, synthetic construct
  source 1..21: mol_type = other RNA
aatctagattgtgaccatcta

SEQ ID NO: 2477 - RNA, 21 nt, synthetic construct
  source 1..21: mol_type = other RNA
aatctataattttcaggacca

SEQ ID NO: 2478 - RNA, 21 nt, synthetic construct
  source 1..21: mol_type = other RNA
aatctatttctcaagctttct

SEQ ID NO: 2479 - RNA, 21 nt, synthetic construct
  source 1..21: mol_type = other RNA
aatctgacaagattcctttac

SEQ ID NO: 2480 - RNA, 21 nt, synthetic construct
  source 1..21: mol_type = other RNA
aatctggtattaaatccttaa

SEQ ID NO: 2481 - RNA, 21 nt, synthetic construct
  source 1..21: mol_type = other RNA
aatcttaaatagacagtgact

SEQ ID NO: 2482 - RNA, 21 nt, synthetic construct
  source 1..21: mol_type = other RNA
aatcttgtcagattacagtaa

SEQ ID NO: 2483 - RNA, 21 nt, synthetic construct
  source 1..21: mol_type = other RNA
aatctttagggatttagggat

SEQ ID NO: 2484 - RNA, 21 nt, synthetic construct
  source 1..21: mol_type = other RNA
aatgaacatatttgtggcatc

SEQ ID NO: 2485 - RNA, 21 nt, synthetic construct
  source 1..21: mol_type = other RNA
aatgaagcagaattaaatact

SEQ ID NO: 2486 - RNA, 21 nt, synthetic construct
  source 1..21: mol_type = other RNA
aatgaagcatcagtttaaaaa

SEQ ID NO: 2487 - RNA, 21 nt, synthetic construct
  source 1..21: mol_type = other RNA
aatgctaagtattgacaaagg

SEQ ID NO: 2488 - RNA, 21 nt, synthetic construct
  source 1..21: mol_type = other RNA
aatggagatgactactaagtc

SEQ ID NO: 2489 - RNA, 21 nt, synthetic construct
  source 1..21: mol_type = other RNA
aatggctcctctcttccccca

SEQ ID NO: 2490 - RNA, 21 nt, synthetic construct
  source 1..21: mol_type = other RNA
aatgtaaacggtattctttaa

SEQ ID NO: 2491 - RNA, 21 nt, synthetic construct
  source 1..21: mol_type = other RNA
aatgtattagaatcacagcat

SEQ ID NO: 2492 - RNA, 21 nt, synthetic construct
  source 1..21: mol_type = other RNA
aatgtgacttagtagtcatct

SEQ ID NO: 2493 - RNA, 21 nt, synthetic construct
  source 1..21: mol_type = other RNA
aatgtggtctaataatctggt

SEQ ID NO: 2494 - RNA, 21 nt, synthetic construct
  source 1..21: mol_type = other RNA
aattaaacccatttgttaaag

SEQ ID NO: 2495 - RNA, 21 nt, synthetic construct
  source 1..21: mol_type = other RNA
aattaccagtcctctgtattt

SEQ ID NO: 2496 - RNA, 21 nt, synthetic construct
  source 1..21: mol_type = other RNA
aattatccaatatacatgtca

SEQ ID NO: 2497 - RNA, 21 nt, synthetic construct
  source 1..21: mol_type = other RNA
aattattcttgcatgtttatc

SEQ ID NO: 2498 - RNA, 21 nt, synthetic construct
  source 1..21: mol_type = other RNA
aattcaataaacaaagaccca

SEQ ID NO: 2499 - RNA, 21 nt, synthetic construct
  source 1..21: mol_type = other RNA
aattctgacaagtgatactgt

SEQ ID NO: 2500 - RNA, 21 nt, synthetic construct
  source 1..21: mol_type = other RNA
aattctgcttcattaggtttc

SEQ ID NO: 2501 - RNA, 21 nt, synthetic construct
  source 1..21: mol_type = other RNA
aattgattcccacatcacaaa

SEQ ID NO: 2502 - RNA, 21 nt, synthetic construct
  source 1..21: mol_type = other RNA
aattggacaatttcaaatgca

SEQ ID NO: 2503 - RNA, 21 nt, synthetic construct
  source 1..21: mol_type = other RNA
aattgtaaaggaatcttgtca

SEQ ID NO: 2504 - RNA, 21 nt, synthetic construct
  source 1..21: mol_type = other RNA
aattgtacagttcttaaatgt

SEQ ID NO: 2505 - RNA, 21 nt, synthetic construct
  source 1..21: mol_type = other RNA
aattgtccaattttgggggaa

SEQ ID NO: 2506 - RNA, 21 nt, synthetic construct
  source 1..21: mol_type = other RNA
aatttaaaatttcttactggc

SEQ ID NO: 2507 - RNA, 21 nt, synthetic construct
  source 1..21: mol_type = other RNA
aatttagggactgggtctttg

SEQ ID NO: 2508 - RNA, 21 nt, synthetic construct
  source 1..21: mol_type = other RNA
aatttcgacagcttagtctgt

SEQ ID NO: 2509 - RNA, 21 nt, synthetic construct
  source 1..21: mol_type = other RNA
aatttctataatttagggact

SEQ ID NO: 2510 - RNA, 21 nt, synthetic construct
  source 1..21: mol_type = other RNA
aatttcttactggcagtttta

SEQ ID NO: 2511 - RNA, 21 nt, synthetic construct
  source 1..21: mol_type = other RNA
aatttggagtaaatgtttgat

SEQ ID NO: 2512 - RNA, 21 nt, synthetic construct
  source 1..21: mol_type = other RNA
aatttgtatctaatctttagg

SEQ ID NO: 2513 - RNA, 21 nt, synthetic construct
  source 1..21: mol_type = other RNA
aattttagatggtcacaatct

SEQ ID NO: 2514 - RNA, 21 nt, synthetic construct
  source 1..21: mol_type = other RNA
aattttcaggaccacagacta

SEQ ID NO: 2515 - RNA, 21 nt, synthetic construct
  source 1..21: mol_type = other RNA
aattttgggggaagagaggag

SEQ ID NO: 2516 - RNA, 21 nt, synthetic construct
  source 1..21: mol_type = other RNA
aattttgtgatgtgggaatca

SEQ ID NO: 2517 - RNA, 21 nt, synthetic construct
  source 1..21: mol_type = other RNA
aatttttaaactgatgcttca

SEQ ID NO: 2518 - RNA, 21 nt, synthetic construct
  source 1..21: mol_type = other RNA
aattttttaccacagtatcac

SEQ ID NO: 2519 - RNA, 21 nt, synthetic construct
  source 1..21: mol_type = other RNA
acaaagacccagtccctaaat

SEQ ID NO: 2520 - RNA, 21 nt, synthetic construct
  source 1..21: mol_type = other RNA
acaaaggtaggtcaccatata

SEQ ID NO: 2521 - RNA, 21 nt, synthetic construct
  source 1..21: mol_type = other RNA
acaaataaggtatagtgatac

SEQ ID NO: 2522 - RNA, 21 nt, synthetic construct
  source 1..21: mol_type = other RNA
acaaataattgtaaaggaatc

SEQ ID NO: 2523 - RNA, 21 nt, synthetic construct
  source 1..21: mol_type = other RNA
acaaatatgttcattcttact

SEQ ID NO: 2524 - RNA, 21 nt, synthetic construct
  source 1..21: mol_type = other RNA
acaaatggagatgactactaa

SEQ ID NO: 2525 - RNA, 21 nt, synthetic construct
  source 1..21: mol_type = other RNA
acaaatttttaaactgatgct

SEQ ID NO: 2526 - RNA, 21 nt, synthetic construct
  source 1..21: mol_type = other RNA
acaaattttttaccacagtat

SEQ ID NO: 2527 - RNA, 21 nt, synthetic construct
  source 1..21: mol_type = other RNA
acaacagatccctaaatccct

SEQ ID NO: 2528 - RNA, 21 nt, synthetic construct
  source 1..21: mol_type = other RNA
acaacatttaagaactgtaca

SEQ ID NO: 2529 - RNA, 21 nt, synthetic construct
  source 1..21: mol_type = other RNA
acaactttcccagtttaaaaa

SEQ ID NO: 2530 - RNA, 21 nt, synthetic construct
  source 1..21: mol_type = other RNA
acaagagtactagttttttaa

SEQ ID NO: 2531 - RNA, 21 nt, synthetic construct
  source 1..21: mol_type = other RNA
acaagattcctttacaattat

SEQ ID NO: 2532 - RNA, 21 nt, synthetic construct
  source 1..21: mol_type = other RNA
acaagcatgtatatatgttta

SEQ ID NO: 2533 - RNA, 21 nt, synthetic construct
  source 1..21: mol_type = other RNA
acaagtgatactgtggtaaaa

SEQ ID NO: 2534 - RNA, 21 nt, synthetic construct
  source 1..21: mol_type = other RNA
acaagttactgaacgtttaaa

SEQ ID NO: 2535 - RNA, 21 nt, synthetic construct
  source 1..21: mol_type = other RNA
acaatcacataaccttaaaga

SEQ ID NO: 2536 - RNA, 21 nt, synthetic construct
  source 1..21: mol_type = other RNA
acaattaccagtcctctgtat

SEQ ID NO: 2537 - RNA, 21 nt, synthetic construct
  source 1..21: mol_type = other RNA
acacatactctgtgctgacga

SEQ ID NO: 2538 - RNA, 21 nt, synthetic construct
  source 1..21: mol_type = other RNA
acacgaatgtattagaatcac

SEQ ID NO: 2539 - RNA, 21 nt, synthetic construct
  source 1..21: mol_type = other RNA
acacttaatactatgaaaaca

SEQ ID NO: 2540 - RNA, 21 nt, synthetic construct
  source 1..21: mol_type = other RNA
acagactaagctgtcgaaatt

SEQ ID NO: 2541 - RNA, 21 nt, synthetic construct
  source 1..21: mol_type = other RNA
acagaggactggtaattgtac

SEQ ID NO: 2542 - RNA, 21 nt, synthetic construct
  source 1..21: mol_type = other RNA
acagagtatgtgtaaaaatct

SEQ ID NO: 2543 - RNA, 21 nt, synthetic construct
  source 1..21: mol_type = other RNA
acagatccctaaatccctaaa

SEQ ID NO: 2544 - RNA, 21 nt, synthetic construct
  source 1..21: mol_type = other RNA
acagatttttacacatactct

SEQ ID NO: 2545 - RNA, 21 nt, synthetic construct
  source 1..21: mol_type = other RNA
acagcatatttaggggaaata

SEQ ID NO: 2546 - RNA, 21 nt, synthetic construct
  source 1..21: mol_type = other RNA
acagcctgacaagcatgtata

SEQ ID NO: 2547 - RNA, 21 nt, synthetic construct
  source 1..21: mol_type = other RNA
acagcgaacttattttaatac

SEQ ID NO: 2548 - RNA, 21 nt, synthetic construct
  source 1..21: mol_type = other RNA
acagcttagtctgtggtcctg

SEQ ID NO: 2549 - RNA, 21 nt, synthetic construct
  source 1..21: mol_type = other RNA
acagtaagaatgaacatattt

SEQ ID NO: 2550 - RNA, 21 nt, synthetic construct
  source 1..21: mol_type = other RNA
acagtatcacttgtcagaatt

SEQ ID NO: 2551 - RNA, 21 nt, synthetic construct
  source 1..21: mol_type = other RNA
acagtatttaattctgcttca

SEQ ID NO: 2552 - RNA, 21 nt, synthetic construct
  source 1..21: mol_type = other RNA
acagtgactttaagataaaaa

SEQ ID NO: 2553 - RNA, 21 nt, synthetic construct
  source 1..21: mol_type = other RNA
acagttcttaaatgttgtagt

SEQ ID NO: 2554 - RNA, 21 nt, synthetic construct
  source 1..21: mol_type = other RNA
acataaccttaaagaataccg

SEQ ID NO: 2555 - RNA, 21 nt, synthetic construct
  source 1..21: mol_type = other RNA
acataatgctaagtattgaca

SEQ ID NO: 2556 - RNA, 21 nt, synthetic construct
  source 1..21: mol_type = other RNA
acatacaatcacataacctta

SEQ ID NO: 2557 - RNA, 21 nt, synthetic construct
  source 1..21: mol_type = other RNA
acatactctgtgctgacgatt

SEQ ID NO: 2558 - RNA, 21 nt, synthetic construct
  source 1..21: mol_type = other RNA
acatagatcatacatatcttt

SEQ ID NO: 2559 - RNA, 21 nt, synthetic construct
  source 1..21: mol_type = other RNA
acatatatacatgcttgtcag

SEQ ID NO: 2560 - RNA, 21 nt, synthetic construct
  source 1..21: mol_type = other RNA
acatatttgtggcatcgagtt

SEQ ID NO: 2561 - RNA, 21 nt, synthetic construct
  source 1..21: mol_type = other RNA
acatcacaacagatccctaaa

SEQ ID NO: 2562 - RNA, 21 nt, synthetic construct
  source 1..21: mol_type = other RNA
acatgaggtatcactatacct

SEQ ID NO: 2563 - RNA, 21 nt, synthetic construct
  source 1..21: mol_type = other RNA
acatgcttgtcaggctgttta

SEQ ID NO: 2564 - RNA, 21 nt, synthetic construct
  source 1..21: mol_type = other RNA
acatgtatattggataatttg

SEQ ID NO: 2565 - RNA, 21 nt, synthetic construct
  source 1..21: mol_type = other RNA
acattaacctcattccaagtt

SEQ ID NO: 2566 - RNA, 21 nt, synthetic construct
  source 1..21: mol_type = other RNA
acattaacttggaatgaggtt

SEQ ID NO: 2567 - RNA, 21 nt, synthetic construct
  source 1..21: mol_type = other RNA
acattcgtgtaggttttcaag

SEQ ID NO: 2568 - RNA, 21 nt, synthetic construct
  source 1..21: mol_type = other RNA
acattgactttaacatgaggt

SEQ ID NO: 2569 - RNA, 21 nt, synthetic construct
  source 1..21: mol_type = other RNA
acatttaagaactgtacaatt

SEQ ID NO: 2570 - RNA, 21 nt, synthetic construct
  source 1..21: mol_type = other RNA
acatttctcaatcaaaattct

SEQ ID NO: 2571 - RNA, 21 nt, synthetic construct
  source 1..21: mol_type = other RNA
accaaaatggctcctctcttc

SEQ ID NO: 2572 - RNA, 21 nt, synthetic construct
  source 1..21: mol_type = other RNA
accaaatagaggaagcaactc

SEQ ID NO: 2573 - RNA, 21 nt, synthetic construct
  source 1..21: mol_type = other RNA
accacagactaagctgtcgaa

SEQ ID NO: 2574 - RNA, 21 nt, synthetic construct
  source 1..21: mol_type = other RNA
accacagtatcacttgtcaga

SEQ ID NO: 2575 - RNA, 21 nt, synthetic construct
  source 1..21: mol_type = other RNA
accacattaacttggaatgag

SEQ ID NO: 2576 - RNA, 21 nt, synthetic construct
  source 1..21: mol_type = other RNA
accagattattagaccacatt

SEQ ID NO: 2577 - RNA, 21 nt, synthetic construct
  source 1..21: mol_type = other RNA
accagtcctctgtatttagtc

SEQ ID NO: 2578 - RNA, 21 nt, synthetic construct
  source 1..21: mol_type = other RNA
accatataacttgggcactat

SEQ ID NO: 2579 - RNA, 21 nt, synthetic construct
  source 1..21: mol_type = other RNA
accatctaaaattgattccca

SEQ ID NO: 2580 - RNA, 21 nt, synthetic construct
  source 1..21: mol_type = other RNA
acccagtccctaaattataga

SEQ ID NO: 2581 - RNA, 21 nt, synthetic construct
  source 1..21: mol_type = other RNA
acccatttgttaaaggatata

SEQ ID NO: 2582 - RNA, 21 nt, synthetic construct
  source 1..21: mol_type = other RNA
accgtttacatttctcaatca

SEQ ID NO: 2583 - RNA, 21 nt, synthetic construct
  source 1..21: mol_type = other RNA
acctaatgaagcagaattaaa

SEQ ID NO: 2584 - RNA, 21 nt, synthetic construct
  source 1..21: mol_type = other RNA
acctacacgaatgtattagaa

SEQ ID NO: 2585 - RNA, 21 nt, synthetic construct
  source 1..21: mol_type = other RNA
acctacctttgtcaatactta

SEQ ID NO: 2586 - RNA, 21 nt, synthetic construct
  source 1..21: mol_type = other RNA
acctattgattataatctaga

SEQ ID NO: 2587 - RNA, 21 nt, synthetic construct
  source 1..21: mol_type = other RNA
acctcatgttaaagtcaatgt

SEQ ID NO: 2588 - RNA, 21 nt, synthetic construct
  source 1..21: mol_type = other RNA
acctcattccaagttaatgtg

SEQ ID NO: 2589 - RNA, 21 nt, synthetic construct
  source 1..21: mol_type = other RNA
acctcgtaacaagttactgaa

SEQ ID NO: 2590 - RNA, 21 nt, synthetic construct
  source 1..21: mol_type = other RNA
accttaaagaataccgtttac

SEQ ID NO: 2591 - RNA, 21 nt, synthetic construct
  source 1..21: mol_type = other RNA
acctttgtcaatacttagcat

SEQ ID NO: 2592 - RNA, 21 nt, synthetic construct
  source 1..21: mol_type = other RNA
acgaatgtattagaatcacag

SEQ ID NO: 2593 - RNA, 21 nt, synthetic construct
  source 1..21: mol_type = other RNA
acgaggtttatttctacttga

SEQ ID NO: 2594 - RNA, 21 nt, synthetic construct
  source 1..21: mol_type = other RNA
acggtattctttaaggttatg

SEQ ID NO: 2595 - RNA, 21 nt, synthetic construct
  source 1..21: mol_type = other RNA
acgttcagtaacttgttacga

SEQ ID NO: 2596 - RNA, 21 nt, synthetic construct
  source 1..21: mol_type = other RNA
acgtttaaacagcctgacaag

SEQ ID NO: 2597 - RNA, 21 nt, synthetic construct
  source 1..21: mol_type = other RNA
actaaaaatcgtcagcacaga

SEQ ID NO: 2598 - RNA, 21 nt, synthetic construct
  source 1..21: mol_type = other RNA
actaaatacagaggactggta

SEQ ID NO: 2599 - RNA, 21 nt, synthetic construct
  source 1..21: mol_type = other RNA
actaagctgtcgaaattaacg

SEQ ID NO: 2600 - RNA, 21 nt, synthetic construct
  source 1..21: mol_type = other RNA
actaagtcacattgactttaa

SEQ ID NO: 2601 - RNA, 21 nt, synthetic construct
  source 1..21: mol_type = other RNA
actacaacatttaagaactgt

SEQ ID NO: 2602 - RNA, 21 nt, synthetic construct
  source 1..21: mol_type = other RNA
actactaagtcacattgactt

SEQ ID NO: 2603 - RNA, 21 nt, synthetic construct
  source 1..21: mol_type = other RNA
actagtactcttgttaaaact

SEQ ID NO: 2604 - RNA, 21 nt, synthetic construct
  source 1..21: mol_type = other RNA
actagttttttaaactgggaa

SEQ ID NO: 2605 - RNA, 21 nt, synthetic construct
  source 1..21: mol_type = other RNA
actatatcctttaacaaatgg

SEQ ID NO: 2606 - RNA, 21 nt, synthetic construct
  source 1..21: mol_type = other RNA
actccaaattattttgtagca

SEQ ID NO: 2607 - RNA, 21 nt, synthetic construct
  source 1..21: mol_type = other RNA
actcgatgccacaaatatgtt

SEQ ID NO: 2608 - RNA, 21 nt, synthetic construct
  source 1..21: mol_type = other RNA
actctaaacttgactaaatac

SEQ ID NO: 2609 - RNA, 21 nt, synthetic construct
  source 1..21: mol_type = other RNA
actctgtgctgacgattttta

SEQ ID NO: 2610 - RNA, 21 nt, synthetic construct
  source 1..21: mol_type = other RNA
actcttgttaaaactctaaac

SEQ ID NO: 2611 - RNA, 21 nt, synthetic construct
  source 1..21: mol_type = other RNA
actgaacgtttaaacagcctg

SEQ ID NO: 2612 - RNA, 21 nt, synthetic construct
  source 1..21: mol_type = other RNA
actgaggcaaatttaaaaggc

SEQ ID NO: 2613 - RNA, 21 nt, synthetic construct
  source 1..21: mol_type = other RNA
actgatgcttcattttgctac

SEQ ID NO: 2614 - RNA, 21 nt, synthetic construct
  source 1..21: mol_type = other RNA
actgccagtaagaaattttaa

SEQ ID NO: 2615 - RNA, 21 nt, synthetic construct
  source 1..21: mol_type = other RNA
actggcagttttaaaaaatca

SEQ ID NO: 2616 - RNA, 21 nt, synthetic construct
  source 1..21: mol_type = other RNA
actgggaaagttgtgatatta

SEQ ID NO: 2617 - RNA, 21 nt, synthetic construct
  source 1..21: mol_type = other RNA
actgggtctttgtttattgaa

SEQ ID NO: 2618 - RNA, 21 nt, synthetic construct
  source 1..21: mol_type = other RNA
actggtaattgtacagttctt

SEQ ID NO: 2619 - RNA, 21 nt, synthetic construct
  source 1..21: mol_type = other RNA
actgtaatctgacaagattcc

SEQ ID NO: 2620 - RNA, 21 nt, synthetic construct
  source 1..21: mol_type = other RNA
actgtacaattaccagtcctc

SEQ ID NO: 2621 - RNA, 21 nt, synthetic construct
  source 1..21: mol_type = other RNA
actgtattaaaataagttcgc

SEQ ID NO: 2622 - RNA, 21 nt, synthetic construct
  source 1..21: mol_type = other RNA
actgtctatttaagattaaac

SEQ ID NO: 2623 - RNA, 21 nt, synthetic construct
  source 1..21: mol_type = other RNA
actgtggtaaaaaatttgtat

SEQ ID NO: 2624 - RNA, 21 nt, synthetic construct
  source 1..21: mol_type = other RNA
acttagcattatgtatttcaa

SEQ ID NO: 2625 - RNA, 21 nt, synthetic construct
  source 1..21: mol_type = other RNA
acttaggattcacatagatca

SEQ ID NO: 2626 - RNA, 21 nt, synthetic construct
  source 1..21: mol_type = other RNA
acttagtagtcatctccattt

SEQ ID NO: 2627 - RNA, 21 nt, synthetic construct
  source 1..21: mol_type = other RNA
acttgaaaacctacacgaatg

SEQ ID NO: 2628 - RNA, 21 nt, synthetic construct
  source 1..21: mol_type = other RNA
acttgactaaatacagaggac

SEQ ID NO: 2629 - RNA, 21 nt, synthetic construct
  source 1..21: mol_type = other RNA
acttggaatgaggttaatgtt

SEQ ID NO: 2630 - RNA, 21 nt, synthetic construct
  source 1..21: mol_type = other RNA
acttgggcactatatccttta

SEQ ID NO: 2631 - RNA, 21 nt, synthetic construct
  source 1..21: mol_type = other RNA
acttgttacgaggtttatttc

SEQ ID NO: 2632 - RNA, 21 nt, synthetic construct
  source 1..21: mol_type = other RNA
actttaacatgaggtatcact

SEQ ID NO: 2633 - RNA, 21 nt, synthetic construct
  source 1..21: mol_type = other RNA
actttaactcgatgccacaaa

SEQ ID NO: 2634 - RNA, 21 nt, synthetic construct
  source 1..21: mol_type = other RNA
actttcccagtttaaaaaact

SEQ ID NO: 2635 - RNA, 21 nt, synthetic construct
  source 1..21: mol_type = other RNA
acttttattttaaaaggcatc

SEQ ID NO: 2636 - RNA, 21 nt, synthetic construct
  source 1..21: mol_type = other RNA
acttttctggaacaaaatatt

SEQ ID NO: 2637 - RNA, 21 nt, synthetic construct
  source 1..21: mol_type = other RNA
agaaagcttgagaaatagatt

SEQ ID NO: 2638 - RNA, 21 nt, synthetic construct
  source 1..21: mol_type = other RNA
agaaataaacctcgtaacaag

SEQ ID NO: 2639 - RNA, 21 nt, synthetic construct
  source 1..21: mol_type = other RNA
agaaatgtaaacggtattctt

SEQ ID NO: 2640 - RNA, 21 nt, synthetic construct
  source 1..21: mol_type = other RNA
agaactgtacaattaccagtc

SEQ ID NO: 2641 - RNA, 21 nt, synthetic construct
  source 1..21: mol_type = other RNA
agaataccaaaatggctcctc

SEQ ID NO: 2642 - RNA, 21 nt, synthetic construct
  source 1..21: mol_type = other RNA
agaataccgtttacatttctc

SEQ ID NO: 2643 - RNA, 21 nt, synthetic construct
  source 1..21: mol_type = other RNA
agaatcacagcatatttaggg

SEQ ID NO: 2644 - RNA, 21 nt, synthetic construct
  source 1..21: mol_type = other RNA
agaatgaacatatttgtggca

SEQ ID NO: 2645 - RNA, 21 nt, synthetic construct
  source 1..21: mol_type = other RNA
agaattttgattgagaaatgt

SEQ ID NO: 2646 - RNA, 21 nt, synthetic construct
  source 1..21: mol_type = other RNA
agacagcgaacttattttaat

SEQ ID NO: 2647 - RNA, 21 nt, synthetic construct
  source 1..21: mol_type = other RNA
agacagtgactttaagataaa

SEQ ID NO: 2648 - RNA, 21 nt, synthetic construct
  source 1..21: mol_type = other RNA
agaccacattaacttggaatg

SEQ ID NO: 2649 - RNA, 21 nt, synthetic construct
  source 1..21: mol_type = other RNA
agacccagtccctaaattata

SEQ ID NO: 2650 - RNA, 21 nt, synthetic construct
  source 1..21: mol_type = other RNA
agactaagctgtcgaaattaa

SEQ ID NO: 2651 - RNA, 21 nt, synthetic construct
  source 1..21: mol_type = other RNA
agacttttattttaaaaggca

SEQ ID NO: 2652 - RNA, 21 nt, synthetic construct
  source 1..21: mol_type = other RNA
agagaaagcttgagaaataga

SEQ ID NO: 2653 - RNA, 21 nt, synthetic construct
  source 1..21: mol_type = other RNA
agagacttttattttaaaagg

SEQ ID NO: 2654 - RNA, 21 nt, synthetic construct
  source 1..21: mol_type = other RNA
agagaggagccattttggtat

SEQ ID NO: 2655 - RNA, 21 nt, synthetic construct
  source 1..21: mol_type = other RNA
agaggaagcaactcatatatt

SEQ ID NO: 2656 - RNA, 21 nt, synthetic construct
  source 1..21: mol_type = other RNA
agaggactggtaattgtacag

SEQ ID NO: 2657 - RNA, 21 nt, synthetic construct
  source 1..21: mol_type = other RNA
agaggagccattttggtattc

SEQ ID NO: 2658 - RNA, 21 nt, synthetic construct
  source 1..21: mol_type = other RNA
agagtactagttttttaaact

SEQ ID NO: 2659 - RNA, 21 nt, synthetic construct
  source 1..21: mol_type = other RNA
agagtatgtgtaaaaatctgt

SEQ ID NO: 2660 - RNA, 21 nt, synthetic construct
  source 1..21: mol_type = other RNA
agagttttaacaagagtacta

SEQ ID NO: 2661 - RNA, 21 nt, synthetic construct
  source 1..21: mol_type = other RNA
agatacaaattttttaccaca

SEQ ID NO: 2662 - RNA, 21 nt, synthetic construct
  source 1..21: mol_type = other RNA
agatatgtatgatctatgtga

SEQ ID NO: 2663 - RNA, 21 nt, synthetic construct
  source 1..21: mol_type = other RNA
agatccctaaatccctaaatc

SEQ ID NO: 2664 - RNA, 21 nt, synthetic construct
  source 1..21: mol_type = other RNA
agatgactactaagtcacatt

SEQ ID NO: 2665 - RNA, 21 nt, synthetic construct
  source 1..21: mol_type = other RNA
agatggtcacaatctagatta

SEQ ID NO: 2666 - RNA, 21 nt, synthetic construct
  source 1..21: mol_type = other RNA
agattaaacatacaatcacat

SEQ ID NO: 2667 - RNA, 21 nt, synthetic construct
  source 1..21: mol_type = other RNA
agattacagtaagaatgaaca

SEQ ID NO: 2668 - RNA, 21 nt, synthetic construct
  source 1..21: mol_type = other RNA
agattataatcaataggtgaa

SEQ ID NO: 2669 - RNA, 21 nt, synthetic construct
  source 1..21: mol_type = other RNA
agattattagaccacattaac

SEQ ID NO: 2670 - RNA, 21 nt, synthetic construct
  source 1..21: mol_type = other RNA
agattcctttacaattatttg

SEQ ID NO: 2671 - RNA, 21 nt, synthetic construct
  source 1..21: mol_type = other RNA
agattgtgaccatctaaaatt

SEQ ID NO: 2672 - RNA, 21 nt, synthetic construct
  source 1..21: mol_type = other RNA
agatttttacacatactctgt

SEQ ID NO: 2673 - RNA, 21 nt, synthetic construct
  source 1..21: mol_type = other RNA
agcaaaatgaagcatcagttt

SEQ ID NO: 2674 - RNA, 21 nt, synthetic construct
  source 1..21: mol_type = other RNA
agcacagagtatgtgtaaaaa

SEQ ID NO: 2675 - RNA, 21 nt, synthetic construct
  source 1..21: mol_type = other RNA
agcagaattaaatactgtatt

SEQ ID NO: 2676 - RNA, 21 nt, synthetic construct
  source 1..21: mol_type = other RNA
agcatatttaggggaaatata

SEQ ID NO: 2677 - RNA, 21 nt, synthetic construct
  source 1..21: mol_type = other RNA
agcatcagtttaaaaatttgt

SEQ ID NO: 2678 - RNA, 21 nt, synthetic construct
  source 1..21: mol_type = other RNA
agccattttggtattctggcc

SEQ ID NO: 2679 - RNA, 21 nt, synthetic construct
  source 1..21: mol_type = other RNA
agcctgacaagcatgtatata

SEQ ID NO: 2680 - RNA, 21 nt, synthetic construct
  source 1..21: mol_type = other RNA
agcgaacttattttaatacag

SEQ ID NO: 2681 - RNA, 21 nt, synthetic construct
  source 1..21: mol_type = other RNA
agcgttaatttcgacagctta

SEQ ID NO: 2682 - RNA, 21 nt, synthetic construct
  source 1..21: mol_type = other RNA
agctaatatcacaactttccc

SEQ ID NO: 2683 - RNA, 21 nt, synthetic construct
  source 1..21: mol_type = other RNA
agctcatatgatgccttttaa

SEQ ID NO: 2684 - RNA, 21 nt, synthetic construct
  source 1..21: mol_type = other RNA
agctgtcgaaattaacgctga

SEQ ID NO: 2685 - RNA, 21 nt, synthetic construct
  source 1..21: mol_type = other RNA
agcttagtctgtggtcctgaa

SEQ ID NO: 2686 - RNA, 21 nt, synthetic construct
  source 1..21: mol_type = other RNA
agcttgagaaatagatttttt

SEQ ID NO: 2687 - RNA, 21 nt, synthetic construct
  source 1..21: mol_type = other RNA
agctttctcttaaggatttaa

SEQ ID NO: 2688 - RNA, 21 nt, synthetic construct
  source 1..21: mol_type = other RNA
aggaagcaactcatatattaa

SEQ ID NO: 2689 - RNA, 21 nt, synthetic construct
  source 1..21: mol_type = other RNA
aggaatcttgtcagattacag

SEQ ID NO: 2690 - RNA, 21 nt, synthetic construct
  source 1..21: mol_type = other RNA
aggaccacagactaagctgtc

SEQ ID NO: 2691 - RNA, 21 nt, synthetic construct
  source 1..21: mol_type = other RNA
aggactggtaattgtacagtt

SEQ ID NO: 2692 - RNA, 21 nt, synthetic construct
  source 1..21: mol_type = other RNA
aggagccattttggtattctg

SEQ ID NO: 2693 - RNA, 21 nt, synthetic construct
  source 1..21: mol_type = other RNA
aggatatagtgcccaagttat

SEQ ID NO: 2694 - RNA, 21 nt, synthetic construct
  source 1..21: mol_type = other RNA
aggattcacatagatcataca

SEQ ID NO: 2695 - RNA, 21 nt, synthetic construct
  source 1..21: mol_type = other RNA
aggatttaataccagattatt

SEQ ID NO: 2696 - RNA, 21 nt, synthetic construct
  source 1..21: mol_type = other RNA
aggcaaatttaaaaggcaata

SEQ ID NO: 2697 - RNA, 21 nt, synthetic construct
  source 1..21: mol_type = other RNA
aggcatcatatgagctaatat

SEQ ID NO: 2698 - RNA, 21 nt, synthetic construct
  source 1..21: mol_type = other RNA
aggctgtttaaacgttcagta

SEQ ID NO: 2699 - RNA, 21 nt, synthetic construct
  source 1..21: mol_type = other RNA
agggactgggtctttgtttat

SEQ ID NO: 2700 - RNA, 21 nt, synthetic construct
  source 1..21: mol_type = other RNA
agggatctgttgtgatgtcga

SEQ ID NO: 2701 - RNA, 21 nt, synthetic construct
  source 1..21: mol_type = other RNA
agggatttagggatctgttgt

SEQ ID NO: 2702 - RNA, 21 nt, synthetic construct
  source 1..21: mol_type = other RNA
agggatttagggatttaggga

SEQ ID NO: 2703 - RNA, 21 nt, synthetic construct
  source 1..21: mol_type = other RNA
agggccagaataccaaaatgg

SEQ ID NO: 2704 - RNA, 21 nt, synthetic construct
  source 1..21: mol_type = other RNA
aggggaaatataaactttaac

SEQ ID NO: 2705 - RNA, 21 nt, synthetic construct
  source 1..21: mol_type = other RNA
aggtaggtcaccatataactt

SEQ ID NO: 2706 - RNA, 21 nt, synthetic construct
  source 1..21: mol_type = other RNA
aggtatagtgatacctcatgt

SEQ ID NO: 2707 - RNA, 21 nt, synthetic construct
  source 1..21: mol_type = other RNA
aggtatcactataccttattt

SEQ ID NO: 2708 - RNA, 21 nt, synthetic construct
  source 1..21: mol_type = other RNA
aggtcaccatataacttgggc

SEQ ID NO: 2709 - RNA, 21 nt, synthetic construct
  source 1..21: mol_type = other RNA
aggtgaacttattaaataact

SEQ ID NO: 2710 - RNA, 21 nt, synthetic construct
  source 1..21: mol_type = other RNA
aggttatgtgattgtatgttt

SEQ ID NO: 2711 - RNA, 21 nt, synthetic construct
  source 1..21: mol_type = other RNA
aggtttatttctacttgaaaa

SEQ ID NO: 2712 - RNA, 21 nt, synthetic construct
  source 1..21: mol_type = other RNA
aggttttcaagtagaaataaa

SEQ ID NO: 2713 - RNA, 21 nt, synthetic construct
  source 1..21: mol_type = other RNA
agtaaatattttgttccagaa

SEQ ID NO: 2714 - RNA, 21 nt, synthetic construct
  source 1..21: mol_type = other RNA
agtaacttgttacgaggttta

SEQ ID NO: 2715 - RNA, 21 nt, synthetic construct
  source 1..21: mol_type = other RNA
agtaagaatgaacatatttgt

SEQ ID NO: 2716 - RNA, 21 nt, synthetic construct
  source 1..21: mol_type = other RNA
agtactagttttttaaactgg

SEQ ID NO: 2717 - RNA, 21 nt, synthetic construct
  source 1..21: mol_type = other RNA
agtactcttgttaaaactcta

SEQ ID NO: 2718 - RNA, 21 nt, synthetic construct
  source 1..21: mol_type = other RNA
agtagaaataaacctcgtaac

SEQ ID NO: 2719 - RNA, 21 nt, synthetic construct
  source 1..21: mol_type = other RNA
agtagtcatctccatttgttt

SEQ ID NO: 2720 - RNA, 21 nt, synthetic construct
  source 1..21: mol_type = other RNA
agtatcacttgtcagaattta

SEQ ID NO: 2721 - RNA, 21 nt, synthetic construct
  source 1..21: mol_type = other RNA
agtatgtgtaaaaatctgtaa

SEQ ID NO: 2722 - RNA, 21 nt, synthetic construct
  source 1..21: mol_type = other RNA
agtattgacaaaggtaggtca

SEQ ID NO: 2723 - RNA, 21 nt, synthetic construct
  source 1..21: mol_type = other RNA
agtatttaattctgcttcatt

SEQ ID NO: 2724 - RNA, 21 nt, synthetic construct
  source 1..21: mol_type = other RNA
agtcaagtttagagttttaac

SEQ ID NO: 2725 - RNA, 21 nt, synthetic construct
  source 1..21: mol_type = other RNA
agtcaatgtgacttagtagtc

SEQ ID NO: 2726 - RNA, 21 nt, synthetic construct
  source 1..21: mol_type = other RNA
agtcacattgactttaacatg

SEQ ID NO: 2727 - RNA, 21 nt, synthetic construct
  source 1..21: mol_type = other RNA
agtcactgtctatttaagatt

SEQ ID NO: 2728 - RNA, 21 nt, synthetic construct
  source 1..21: mol_type = other RNA
agtcatctccatttgtttaaa

SEQ ID NO: 2729 - RNA, 21 nt, synthetic construct
  source 1..21: mol_type = other RNA
agtccctaaattatagaaatt

SEQ ID NO: 2730 - RNA, 21 nt, synthetic construct
  source 1..21: mol_type = other RNA
agtcctctgtatttagtcaag

SEQ ID NO: 2731 - RNA, 21 nt, synthetic construct
  source 1..21: mol_type = other RNA
agtctgtggtcctgaaaatta

SEQ ID NO: 2732 - RNA, 21 nt, synthetic construct
  source 1..21: mol_type = other RNA
agtgatacctcatgttaaagt

SEQ ID NO: 2733 - RNA, 21 nt, synthetic construct
  source 1..21: mol_type = other RNA
agtgatactgtggtaaaaaat

SEQ ID NO: 2734 - RNA, 21 nt, synthetic construct
  source 1..21: mol_type = other RNA
agtgcccaagttatatggtga

SEQ ID NO: 2735 - RNA, 21 nt, synthetic construct
  source 1..21: mol_type = other RNA
agttaaagtttatatttcccc

SEQ ID NO: 2736 - RNA, 21 nt, synthetic construct
  source 1..21: mol_type = other RNA
agttaatgtggtctaataatc

SEQ ID NO: 2737 - RNA, 21 nt, synthetic construct
  source 1..21: mol_type = other RNA
agttactgaacgtttaaacag

SEQ ID NO: 2738 - RNA, 21 nt, synthetic construct
  source 1..21: mol_type = other RNA
agttatatggtgacctacctt

SEQ ID NO: 2739 - RNA, 21 nt, synthetic construct
  source 1..21: mol_type = other RNA
agttatttaataagttcacct

SEQ ID NO: 2740 - RNA, 21 nt, synthetic construct
  source 1..21: mol_type = other RNA
agttcacctattgattataat

SEQ ID NO: 2741 - RNA, 21 nt, synthetic construct
  source 1..21: mol_type = other RNA
agttcgctgtctttaaacaaa

SEQ ID NO: 2742 - RNA, 21 nt, synthetic construct
  source 1..21: mol_type = other RNA
agttcttaaatgttgtagtat

SEQ ID NO: 2743 - RNA, 21 nt, synthetic construct
  source 1..21: mol_type = other RNA
agttgtgatattagctcatat

SEQ ID NO: 2744 - RNA, 21 nt, synthetic construct
  source 1..21: mol_type = other RNA
agtttaaaaaactagtactct

SEQ ID NO: 2745 - RNA, 21 nt, synthetic construct
  source 1..21: mol_type = other RNA
agtttagagttttaacaagag

SEQ ID NO: 2746 - RNA, 21 nt, synthetic construct
  source 1..21: mol_type = other RNA
agtttatatttcccctaaata

SEQ ID NO: 2747 - RNA, 21 nt, synthetic construct
  source 1..21: mol_type = other RNA
agttttaacaagagtactagt

SEQ ID NO: 2748 - RNA, 21 nt, synthetic construct
  source 1..21: mol_type = other RNA
agttttttaaactgggaaagt

SEQ ID NO: 2749 - RNA, 21 nt, synthetic construct
  source 1..21: mol_type = other RNA
ataaacaaagacccagtccct

SEQ ID NO: 2750 - RNA, 21 nt, synthetic construct
  source 1..21: mol_type = other RNA
ataaacctcgtaacaagttac

SEQ ID NO: 2751 - RNA, 21 nt, synthetic construct
  source 1..21: mol_type = other RNA
ataaactttaactcgatgcca

SEQ ID NO: 2752 - RNA, 21 nt, synthetic construct
  source 1..21: mol_type = other RNA
ataaattctgacaagtgatac

SEQ ID NO: 2753 - RNA, 21 nt, synthetic construct
  source 1..21: mol_type = other RNA
ataaccttaaagaataccgtt

SEQ ID NO: 2754 - RNA, 21 nt, synthetic construct
  source 1..21: mol_type = other RNA
ataacttgggcactatatcct

SEQ ID NO: 2755 - RNA, 21 nt, synthetic construct
  source 1..21: mol_type = other RNA
ataaggtatagtgatacctca

SEQ ID NO: 2756 - RNA, 21 nt, synthetic construct
  source 1..21: mol_type = other RNA
ataagttcacctattgattat

SEQ ID NO: 2757 - RNA, 21 nt, synthetic construct
  source 1..21: mol_type = other RNA
ataagttcgctgtctttaaac

SEQ ID NO: 2758 - RNA, 21 nt, synthetic construct
  source 1..21: mol_type = other RNA
ataatcaataggtgaacttat

SEQ ID NO: 2759 - RNA, 21 nt, synthetic construct
  source 1..21: mol_type = other RNA
ataatctagattgtgaccatc

SEQ ID NO: 2760 - RNA, 21 nt, synthetic construct
  source 1..21: mol_type = other RNA
ataatctataattttcaggac

SEQ ID NO: 2761 - RNA, 21 nt, synthetic construct
  source 1..21: mol_type = other RNA
ataatctggtattaaatcctt

SEQ ID NO: 2762 - RNA, 21 nt, synthetic construct
  source 1..21: mol_type = other RNA
ataatgctaagtattgacaaa

SEQ ID NO: 2763 - RNA, 21 nt, synthetic construct
  source 1..21: mol_type = other RNA
ataattgtaaaggaatcttgt

SEQ ID NO: 2764 - RNA, 21 nt, synthetic construct
  source 1..21: mol_type = other RNA
ataatttagggactgggtctt

SEQ ID NO: 2765 - RNA, 21 nt, synthetic construct
  source 1..21: mol_type = other RNA
ataatttggagtaaatgtttg

SEQ ID NO: 2766 - RNA, 21 nt, synthetic construct
  source 1..21: mol_type = other RNA
ataattttcaggaccacagac

SEQ ID NO: 2767 - RNA, 21 nt, synthetic construct
  source 1..21: mol_type = other RNA
atacaaattttttaccacagt

SEQ ID NO: 2768 - RNA, 21 nt, synthetic construct
  source 1..21: mol_type = other RNA
atacaatcacataaccttaaa

SEQ ID NO: 2769 - RNA, 21 nt, synthetic construct
  source 1..21: mol_type = other RNA
atacagaggactggtaattgt

SEQ ID NO: 2770 - RNA, 21 nt, synthetic construct
  source 1..21: mol_type = other RNA
atacagtatttaattctgctt

SEQ ID NO: 2771 - RNA, 21 nt, synthetic construct
  source 1..21: mol_type = other RNA
atacataatgctaagtattga

SEQ ID NO: 2772 - RNA, 21 nt, synthetic construct
  source 1..21: mol_type = other RNA
atacatgcttgtcaggctgtt

SEQ ID NO: 2773 - RNA, 21 nt, synthetic construct
  source 1..21: mol_type = other RNA
atacattcgtgtaggttttca

SEQ ID NO: 2774 - RNA, 21 nt, synthetic construct
  source 1..21: mol_type = other RNA
ataccaaaatggctcctctct

SEQ ID NO: 2775 - RNA, 21 nt, synthetic construct
  source 1..21: mol_type = other RNA
ataccagattattagaccaca

SEQ ID NO: 2776 - RNA, 21 nt, synthetic construct
  source 1..21: mol_type = other RNA
ataccgtttacatttctcaat

SEQ ID NO: 2777 - RNA, 21 nt, synthetic construct
  source 1..21: mol_type = other RNA
atacctcatgttaaagtcaat

SEQ ID NO: 2778 - RNA, 21 nt, synthetic construct
  source 1..21: mol_type = other RNA
atactacaacatttaagaact

SEQ ID NO: 2779 - RNA, 21 nt, synthetic construct
  source 1..21: mol_type = other RNA
atactctgtgctgacgatttt

SEQ ID NO: 2780 - RNA, 21 nt, synthetic construct
  source 1..21: mol_type = other RNA
atactgtggtaaaaaatttgt

SEQ ID NO: 2781 - RNA, 21 nt, synthetic construct
  source 1..21: mol_type = other RNA
atacttagcattatgtatttc

SEQ ID NO: 2782 - RNA, 21 nt, synthetic construct
  source 1..21: mol_type = other RNA
atagacagtgactttaagata

SEQ ID NO: 2783 - RNA, 21 nt, synthetic construct
  source 1..21: mol_type = other RNA
atagaggaagcaactcatata

SEQ ID NO: 2784 - RNA, 21 nt, synthetic construct
  source 1..21: mol_type = other RNA
atagtgatacctcatgttaaa

SEQ ID NO: 2785 - RNA, 21 nt, synthetic construct
  source 1..21: mol_type = other RNA
atagtgcccaagttatatggt

SEQ ID NO: 2786 - RNA, 21 nt, synthetic construct
  source 1..21: mol_type = other RNA
atataaactttaactcgatgc

SEQ ID NO: 2787 - RNA, 21 nt, synthetic construct
  source 1..21: mol_type = other RNA
atataacttgggcactatatc

SEQ ID NO: 2788 - RNA, 21 nt, synthetic construct
  source 1..21: mol_type = other RNA
atatacatgcttgtcaggctg

SEQ ID NO: 2789 - RNA, 21 nt, synthetic construct
  source 1..21: mol_type = other RNA
atatagtgcccaagttatatg

SEQ ID NO: 2790 - RNA, 21 nt, synthetic construct
  source 1..21: mol_type = other RNA
atatatacatgcttgtcaggc

SEQ ID NO: 2791 - RNA, 21 nt, synthetic construct
  source 1..21: mol_type = other RNA
atatatgacatgtatattgga

SEQ ID NO: 2792 - RNA, 21 nt, synthetic construct
  source 1..21: mol_type = other RNA
atatatgagttgcttcctcta

SEQ ID NO: 2793 - RNA, 21 nt, synthetic construct
  source 1..21: mol_type = other RNA
atatcaaacatttactccaaa

SEQ ID NO: 2794 - RNA, 21 nt, synthetic construct
  source 1..21: mol_type = other RNA
atatcacaactttcccagttt

SEQ ID NO: 2795 - RNA, 21 nt, synthetic construct
  source 1..21: mol_type = other RNA
atatcctttaacaaatgggtt

SEQ ID NO: 2796 - RNA, 21 nt, synthetic construct
  source 1..21: mol_type = other RNA
atatgacatgtatattggata

SEQ ID NO: 2797 - RNA, 21 nt, synthetic construct
  source 1..21: mol_type = other RNA
atatgagctaatatcacaact

SEQ ID NO: 2798 - RNA, 21 nt, synthetic construct
  source 1..21: mol_type = other RNA
atatgagttgcttcctctatt

SEQ ID NO: 2799 - RNA, 21 nt, synthetic construct
  source 1..21: mol_type = other RNA
atatgattttttaaaactgcc

SEQ ID NO: 2800 - RNA, 21 nt, synthetic construct
  source 1..21: mol_type = other RNA
atatgctgtgattctaataca

SEQ ID NO: 2801 - RNA, 21 nt, synthetic construct
  source 1..21: mol_type = other RNA
atatggtgacctacctttgtc

SEQ ID NO: 2802 - RNA, 21 nt, synthetic construct
  source 1..21: mol_type = other RNA
atatgtatgatctatgtgaat

SEQ ID NO: 2803 - RNA, 21 nt, synthetic construct
  source 1..21: mol_type = other RNA
atatgttcattcttactgtaa

SEQ ID NO: 2804 - RNA, 21 nt, synthetic construct
  source 1..21: mol_type = other RNA
atattagctcatatgatgcct

SEQ ID NO: 2805 - RNA, 21 nt, synthetic construct
  source 1..21: mol_type = other RNA
atatttacttaggattcacat

SEQ ID NO: 2806 - RNA, 21 nt, synthetic construct
  source 1..21: mol_type = other RNA
atatttaggggaaatataaac

SEQ ID NO: 2807 - RNA, 21 nt, synthetic construct
  source 1..21: mol_type = other RNA
atatttcccctaaatatgctg

SEQ ID NO: 2808 - RNA, 21 nt, synthetic construct
  source 1..21: mol_type = other RNA
atatttgtggcatcgagttaa

SEQ ID NO: 2809 - RNA, 21 nt, synthetic construct
  source 1..21: mol_type = other RNA
atattttgttccagaaaagta

SEQ ID NO: 2810 - RNA, 21 nt, synthetic construct
  source 1..21: mol_type = other RNA
atcaaacatttactccaaatt

SEQ ID NO: 2811 - RNA, 21 nt, synthetic construct
  source 1..21: mol_type = other RNA
atcaataggtgaacttattaa

SEQ ID NO: 2812 - RNA, 21 nt, synthetic construct
  source 1..21: mol_type = other RNA
atcaattttagatggtcacaa

SEQ ID NO: 2813 - RNA, 21 nt, synthetic construct
  source 1..21: mol_type = other RNA
atcacaacagatccctaaatc

SEQ ID NO: 2814 - RNA, 21 nt, synthetic construct
  source 1..21: mol_type = other RNA
atcacaactttcccagtttaa

SEQ ID NO: 2815 - RNA, 21 nt, synthetic construct
  source 1..21: mol_type = other RNA
atcacagcatatttaggggaa

SEQ ID NO: 2816 - RNA, 21 nt, synthetic construct
  source 1..21: mol_type = other RNA
atcacataaccttaaagaata

SEQ ID NO: 2817 - RNA, 21 nt, synthetic construct
  source 1..21: mol_type = other RNA
atcactataccttatttgtta

SEQ ID NO: 2818 - RNA, 21 nt, synthetic construct
  source 1..21: mol_type = other RNA
atcacttgtcagaatttattt

SEQ ID NO: 2819 - RNA, 21 nt, synthetic construct
  source 1..21: mol_type = other RNA
atcagcgttaatttcgacagc

SEQ ID NO: 2820 - RNA, 21 nt, synthetic construct
  source 1..21: mol_type = other RNA
atcatatcaaacatttactcc

SEQ ID NO: 2821 - RNA, 21 nt, synthetic construct
  source 1..21: mol_type = other RNA
atcatatgagctaatatcaca

SEQ ID NO: 2822 - RNA, 21 nt, synthetic construct
  source 1..21: mol_type = other RNA
atccaatatacatgtcatata

SEQ ID NO: 2823 - RNA, 21 nt, synthetic construct
  source 1..21: mol_type = other RNA
atccctaaagattagatacaa

SEQ ID NO: 2824 - RNA, 21 nt, synthetic construct
  source 1..21: mol_type = other RNA
atccctaaatccctaaagatt

SEQ ID NO: 2825 - RNA, 21 nt, synthetic construct
  source 1..21: mol_type = other RNA
atccctaaatccctaaatccc

SEQ ID NO: 2826 - RNA, 21 nt, synthetic construct
  source 1..21: mol_type = other RNA
atccttaagagaaagcttgag

SEQ ID NO: 2827 - RNA, 21 nt, synthetic construct
  source 1..21: mol_type = other RNA
atcctttaacaaatgggttta

SEQ ID NO: 2828 - RNA, 21 nt, synthetic construct
  source 1..21: mol_type = other RNA
atcgacatcacaacagatccc

SEQ ID NO: 2829 - RNA, 21 nt, synthetic construct
  source 1..21: mol_type = other RNA
atcgtcagcacagagtatgtg

SEQ ID NO: 2830 - RNA, 21 nt, synthetic construct
  source 1..21: mol_type = other RNA
atctaaaattgattcccacat

SEQ ID NO: 2831 - RNA, 21 nt, synthetic construct
  source 1..21: mol_type = other RNA
atctaatctttagggatttag

SEQ ID NO: 2832 - RNA, 21 nt, synthetic construct
  source 1..21: mol_type = other RNA
atctagattataatcaatagg

SEQ ID NO: 2833 - RNA, 21 nt, synthetic construct
  source 1..21: mol_type = other RNA
atctagattgtgaccatctaa

SEQ ID NO: 2834 - RNA, 21 nt, synthetic construct
  source 1..21: mol_type = other RNA
atctataattttcaggaccac

SEQ ID NO: 2835 - RNA, 21 nt, synthetic construct
  source 1..21: mol_type = other RNA
atctatgtgaatcctaagtaa

SEQ ID NO: 2836 - RNA, 21 nt, synthetic construct
  source 1..21: mol_type = other RNA
atctatttctcaagctttctc

SEQ ID NO: 2837 - RNA, 21 nt, synthetic construct
  source 1..21: mol_type = other RNA
atctccatttgtttaaagaca

SEQ ID NO: 2838 - RNA, 21 nt, synthetic construct
  source 1..21: mol_type = other RNA
atctgacaagattcctttaca

SEQ ID NO: 2839 - RNA, 21 nt, synthetic construct
  source 1..21: mol_type = other RNA
atctggtattaaatccttaag

SEQ ID NO: 2840 - RNA, 21 nt, synthetic construct
  source 1..21: mol_type = other RNA
atctgttgtgatgtcgataaa

SEQ ID NO: 2841 - RNA, 21 nt, synthetic construct
  source 1..21: mol_type = other RNA
atcttaaagtcactgtctatt

SEQ ID NO: 2842 - RNA, 21 nt, synthetic construct
  source 1..21: mol_type = other RNA
atcttaaatagacagtgactt

SEQ ID NO: 2843 - RNA, 21 nt, synthetic construct
  source 1..21: mol_type = other RNA
atcttgtcagattacagtaag

SEQ ID NO: 2844 - RNA, 21 nt, synthetic construct
  source 1..21: mol_type = other RNA
atctttagggatttagggatt

SEQ ID NO: 2845 - RNA, 21 nt, synthetic construct
  source 1..21: mol_type = other RNA
atgaaacctaatgaagcagaa

SEQ ID NO: 2846 - RNA, 21 nt, synthetic construct
  source 1..21: mol_type = other RNA
atgaacatatttgtggcatcg

SEQ ID NO: 2847 - RNA, 21 nt, synthetic construct
  source 1..21: mol_type = other RNA
atgaagcagaattaaatactg

SEQ ID NO: 2848 - RNA, 21 nt, synthetic construct
  source 1..21: mol_type = other RNA
atgaagcatcagtttaaaaat

SEQ ID NO: 2849 - RNA, 21 nt, synthetic construct
  source 1..21: mol_type = other RNA
atgacatgtatattggataat

SEQ ID NO: 2850 - RNA, 21 nt, synthetic construct
  source 1..21: mol_type = other RNA
atgactactaagtcacattga

SEQ ID NO: 2851 - RNA, 21 nt, synthetic construct
  source 1..21: mol_type = other RNA
atgagctaatatcacaacttt

SEQ ID NO: 2852 - RNA, 21 nt, synthetic construct
  source 1..21: mol_type = other RNA
atgaggtatcactatacctta

SEQ ID NO: 2853 - RNA, 21 nt, synthetic construct
  source 1..21: mol_type = other RNA
atgatctatgtgaatcctaag

SEQ ID NO: 2854 - RNA, 21 nt, synthetic construct
  source 1..21: mol_type = other RNA
atgattttttaaaactgccag

SEQ ID NO: 2855 - RNA, 21 nt, synthetic construct
  source 1..21: mol_type = other RNA
atgccacaaatatgttcattc

SEQ ID NO: 2856 - RNA, 21 nt, synthetic construct
  source 1..21: mol_type = other RNA
atgccttttaaaataaaagtc

SEQ ID NO: 2857 - RNA, 21 nt, synthetic construct
  source 1..21: mol_type = other RNA
atgctaagtattgacaaaggt

SEQ ID NO: 2858 - RNA, 21 nt, synthetic construct
  source 1..21: mol_type = other RNA
atgctgtgattctaatacatt

SEQ ID NO: 2859 - RNA, 21 nt, synthetic construct
  source 1..21: mol_type = other RNA
atgcttcattttgctacaaaa

SEQ ID NO: 2860 - RNA, 21 nt, synthetic construct
  source 1..21: mol_type = other RNA
atgcttgtcaggctgtttaaa

SEQ ID NO: 2861 - RNA, 21 nt, synthetic construct
  source 1..21: mol_type = other RNA
atggagatgactactaagtca

SEQ ID NO: 2862 - RNA, 21 nt, synthetic construct
  source 1..21: mol_type = other RNA
atggctcctctcttcccccaa

SEQ ID NO: 2863 - RNA, 21 nt, synthetic construct
  source 1..21: mol_type = other RNA
atggtcacaatctagattata

SEQ ID NO: 2864 - RNA, 21 nt, synthetic construct
  source 1..21: mol_type = other RNA
atggtgacctacctttgtcaa

SEQ ID NO: 2865 - RNA, 21 nt, synthetic construct
  source 1..21: mol_type = other RNA
atgtaaacggtattctttaag

SEQ ID NO: 2866 - RNA, 21 nt, synthetic construct
  source 1..21: mol_type = other RNA
atgtatgatctatgtgaatcc

SEQ ID NO: 2867 - RNA, 21 nt, synthetic construct
  source 1..21: mol_type = other RNA
atgtattagaatcacagcata

SEQ ID NO: 2868 - RNA, 21 nt, synthetic construct
  source 1..21: mol_type = other RNA
atgtcgataaacatgcaagaa

SEQ ID NO: 2869 - RNA, 21 nt, synthetic construct
  source 1..21: mol_type = other RNA
atgtgaatcctaagtaaatat

SEQ ID NO: 2870 - RNA, 21 nt, synthetic construct
  source 1..21: mol_type = other RNA
atgtgacttagtagtcatctc

SEQ ID NO: 2871 - RNA, 21 nt, synthetic construct
  source 1..21: mol_type = other RNA
atgtgattgtatgtttaatct

SEQ ID NO: 2872 - RNA, 21 nt, synthetic construct
  source 1..21: mol_type = other RNA
atgtgggaatcaattttagat

SEQ ID NO: 2873 - RNA, 21 nt, synthetic construct
  source 1..21: mol_type = other RNA
atgtggtctaataatctggta

SEQ ID NO: 2874 - RNA, 21 nt, synthetic construct
  source 1..21: mol_type = other RNA
atgtgtaaaaatctgtaatac

SEQ ID NO: 2875 - RNA, 21 nt, synthetic construct
  source 1..21: mol_type = other RNA
atgttaaagtcaatgtgactt

SEQ ID NO: 2876 - RNA, 21 nt, synthetic construct
  source 1..21: mol_type = other RNA
atgttcattcttactgtaatc

SEQ ID NO: 2877 - RNA, 21 nt, synthetic construct
  source 1..21: mol_type = other RNA
atgtttatcgacatcacaaca

SEQ ID NO: 2878 - RNA, 21 nt, synthetic construct
  source 1..21: mol_type = other RNA
attaaaataagttcgctgtct

SEQ ID NO: 2879 - RNA, 21 nt, synthetic construct
  source 1..21: mol_type = other RNA
attaaacccatttgttaaagg

SEQ ID NO: 2880 - RNA, 21 nt, synthetic construct
  source 1..21: mol_type = other RNA
attaaatccttaagagaaagc

SEQ ID NO: 2881 - RNA, 21 nt, synthetic construct
  source 1..21: mol_type = other RNA
attaacctcattccaagttaa

SEQ ID NO: 2882 - RNA, 21 nt, synthetic construct
  source 1..21: mol_type = other RNA
attaacttggaatgaggttaa

SEQ ID NO: 2883 - RNA, 21 nt, synthetic construct
  source 1..21: mol_type = other RNA
attacagatttttacacatac

SEQ ID NO: 2884 - RNA, 21 nt, synthetic construct
  source 1..21: mol_type = other RNA
attacagtaagaatgaacata

SEQ ID NO: 2885 - RNA, 21 nt, synthetic construct
  source 1..21: mol_type = other RNA
attaccagtcctctgtattta

SEQ ID NO: 2886 - RNA, 21 nt, synthetic construct
  source 1..21: mol_type = other RNA
attagaatcacagcatattta

SEQ ID NO: 2887 - RNA, 21 nt, synthetic construct
  source 1..21: mol_type = other RNA
attagaccacattaacttgga

SEQ ID NO: 2888 - RNA, 21 nt, synthetic construct
  source 1..21: mol_type = other RNA
attagctcatatgatgccttt

SEQ ID NO: 2889 - RNA, 21 nt, synthetic construct
  source 1..21: mol_type = other RNA
attataatcaataggtgaact

SEQ ID NO: 2890 - RNA, 21 nt, synthetic construct
  source 1..21: mol_type = other RNA
attataatctagattgtgacc

SEQ ID NO: 2891 - RNA, 21 nt, synthetic construct
  source 1..21: mol_type = other RNA
attatccaatatacatgtcat

SEQ ID NO: 2892 - RNA, 21 nt, synthetic construct
  source 1..21: mol_type = other RNA
attattagaccacattaactt

SEQ ID NO: 2893 - RNA, 21 nt, synthetic construct
  source 1..21: mol_type = other RNA
attattcttgcatgtttatcg

SEQ ID NO: 2894 - RNA, 21 nt, synthetic construct
  source 1..21: mol_type = other RNA
attattttgtacttttctgga

SEQ ID NO: 2895 - RNA, 21 nt, synthetic construct
  source 1..21: mol_type = other RNA
attcaataaacaaagacccag

SEQ ID NO: 2896 - RNA, 21 nt, synthetic construct
  source 1..21: mol_type = other RNA
attcacatagatcatacatat

SEQ ID NO: 2897 - RNA, 21 nt, synthetic construct
  source 1..21: mol_type = other RNA
attccaagttaatgtggtcta

SEQ ID NO: 2898 - RNA, 21 nt, synthetic construct
  source 1..21: mol_type = other RNA
attcccacatcacaaaattta

SEQ ID NO: 2899 - RNA, 21 nt, synthetic construct
  source 1..21: mol_type = other RNA
attcgtgtaggttttcaagta

SEQ ID NO: 2900 - RNA, 21 nt, synthetic construct
  source 1..21: mol_type = other RNA
attctaatacattcgtgtagg

SEQ ID NO: 2901 - RNA, 21 nt, synthetic construct
  source 1..21: mol_type = other RNA
attctgacaagtgatactgtg

SEQ ID NO: 2902 - RNA, 21 nt, synthetic construct
  source 1..21: mol_type = other RNA
attctgcttcattaggtttca

SEQ ID NO: 2903 - RNA, 21 nt, synthetic construct
  source 1..21: mol_type = other RNA
attcttactgtaatctgacaa

SEQ ID NO: 2904 - RNA, 21 nt, synthetic construct
  source 1..21: mol_type = other RNA
attcttgcatgtttatcgaca

SEQ ID NO: 2905 - RNA, 21 nt, synthetic construct
  source 1..21: mol_type = other RNA
attctttaaggttatgtgatt

SEQ ID NO: 2906 - RNA, 21 nt, synthetic construct
  source 1..21: mol_type = other RNA
attgacaaaggtaggtcacca

SEQ ID NO: 2907 - RNA, 21 nt, synthetic construct
  source 1..21: mol_type = other RNA
attgactttaacatgaggtat

SEQ ID NO: 2908 - RNA, 21 nt, synthetic construct
  source 1..21: mol_type = other RNA
attgagaaatgtaaacggtat

SEQ ID NO: 2909 - RNA, 21 nt, synthetic construct
  source 1..21: mol_type = other RNA
attgattcccacatcacaaaa

SEQ ID NO: 2910 - RNA, 21 nt, synthetic construct
  source 1..21: mol_type = other RNA
attggacaatttcaaatgcaa

SEQ ID NO: 2911 - RNA, 21 nt, synthetic construct
  source 1..21: mol_type = other RNA
attgtaaaggaatcttgtcag

SEQ ID NO: 2912 - RNA, 21 nt, synthetic construct
  source 1..21: mol_type = other RNA
attgtacagttcttaaatgtt

SEQ ID NO: 2913 - RNA, 21 nt, synthetic construct
  source 1..21: mol_type = other RNA
attgtccaattttgggggaag

SEQ ID NO: 2914 - RNA, 21 nt, synthetic construct
  source 1..21: mol_type = other RNA
attgtgaccatctaaaattga

SEQ ID NO: 2915 - RNA, 21 nt, synthetic construct
  source 1..21: mol_type = other RNA
atttaaaatttcttactggca

SEQ ID NO: 2916 - RNA, 21 nt, synthetic construct
  source 1..21: mol_type = other RNA
atttaaacattaacctcattc

SEQ ID NO: 2917 - RNA, 21 nt, synthetic construct
  source 1..21: mol_type = other RNA
atttaagaactgtacaattac

SEQ ID NO: 2918 - RNA, 21 nt, synthetic construct
  source 1..21: mol_type = other RNA
atttaataagttcacctattg

SEQ ID NO: 2919 - RNA, 21 nt, synthetic construct
  source 1..21: mol_type = other RNA
atttaatatatgagttgcttc

SEQ ID NO: 2920 - RNA, 21 nt, synthetic construct
  source 1..21: mol_type = other RNA
atttaattctgcttcattagg

SEQ ID NO: 2921 - RNA, 21 nt, synthetic construct
  source 1..21: mol_type = other RNA
atttacttaggattcacatag

SEQ ID NO: 2922 - RNA, 21 nt, synthetic construct
  source 1..21: mol_type = other RNA
atttagggactgggtctttgt

SEQ ID NO: 2923 - RNA, 21 nt, synthetic construct
  source 1..21: mol_type = other RNA
atttagggatctgttgtgatg

SEQ ID NO: 2924 - RNA, 21 nt, synthetic construct
  source 1..21: mol_type = other RNA
atttagggatttagggatctg

SEQ ID NO: 2925 - RNA, 21 nt, synthetic construct
  source 1..21: mol_type = other RNA
atttaggggaaatataaactt

SEQ ID NO: 2926 - RNA, 21 nt, synthetic construct
  source 1..21: mol_type = other RNA
atttagtcaagtttagagttt

SEQ ID NO: 2927 - RNA, 21 nt, synthetic construct
  source 1..21: mol_type = other RNA
atttatgaaacctaatgaagc

SEQ ID NO: 2928 - RNA, 21 nt, synthetic construct
  source 1..21: mol_type = other RNA
atttcaaaactaaaaatcgtc

SEQ ID NO: 2929 - RNA, 21 nt, synthetic construct
  source 1..21: mol_type = other RNA
atttcccctaaatatgctgtg

SEQ ID NO: 2930 - RNA, 21 nt, synthetic construct
  source 1..21: mol_type = other RNA
atttcgacagcttagtctgtg

SEQ ID NO: 2931 - RNA, 21 nt, synthetic construct
  source 1..21: mol_type = other RNA
atttctacttgaaaacctaca

SEQ ID NO: 2932 - RNA, 21 nt, synthetic construct
  source 1..21: mol_type = other RNA
atttctataatttagggactg

SEQ ID NO: 2933 - RNA, 21 nt, synthetic construct
  source 1..21: mol_type = other RNA
atttctcaagctttctcttaa

SEQ ID NO: 2934 - RNA, 21 nt, synthetic construct
  source 1..21: mol_type = other RNA
atttcttactggcagttttaa

SEQ ID NO: 2935 - RNA, 21 nt, synthetic construct
  source 1..21: mol_type = other RNA
atttgaaattgtccaattttg

SEQ ID NO: 2936 - RNA, 21 nt, synthetic construct
  source 1..21: mol_type = other RNA
atttggagtaaatgtttgata

SEQ ID NO: 2937 - RNA, 21 nt, synthetic construct
  source 1..21: mol_type = other RNA
atttgtatctaatctttaggg

SEQ ID NO: 2938 - RNA, 21 nt, synthetic construct
  source 1..21: mol_type = other RNA
atttgtggcatcgagttaaag

SEQ ID NO: 2939 - RNA, 21 nt, synthetic construct
  source 1..21: mol_type = other RNA
atttgttaaaggatatagtgc

SEQ ID NO: 2940 - RNA, 21 nt, synthetic construct
  source 1..21: mol_type = other RNA
atttgtttaaagacagcgaac

SEQ ID NO: 2941 - RNA, 21 nt, synthetic construct
  source 1..21: mol_type = other RNA
attttaaaaggcatcatatga

SEQ ID NO: 2942 - RNA, 21 nt, synthetic construct
  source 1..21: mol_type = other RNA
attttagatggtcacaatcta

SEQ ID NO: 2943 - RNA, 21 nt, synthetic construct
  source 1..21: mol_type = other RNA
attttcaggaccacagactaa

SEQ ID NO: 2944 - RNA, 21 nt, synthetic construct
  source 1..21: mol_type = other RNA
attttgcatttgaaattgtcc

SEQ ID NO: 2945 - RNA, 21 nt, synthetic construct
  source 1..21: mol_type = other RNA
attttgggggaagagaggagc

SEQ ID NO: 2946 - RNA, 21 nt, synthetic construct
  source 1..21: mol_type = other RNA
attttggtattctggccctaa

SEQ ID NO: 2947 - RNA, 21 nt, synthetic construct
  source 1..21: mol_type = other RNA
attttgtacttttctggaaca

SEQ ID NO: 2948 - RNA, 21 nt, synthetic construct
  source 1..21: mol_type = other RNA
attttgtagcaaaatgaagca

SEQ ID NO: 2949 - RNA, 21 nt, synthetic construct
  source 1..21: mol_type = other RNA
attttgtgatgtgggaatcaa

SEQ ID NO: 2950 - RNA, 21 nt, synthetic construct
  source 1..21: mol_type = other RNA
attttgttccagaaaagtaca

SEQ ID NO: 2951 - RNA, 21 nt, synthetic construct
  source 1..21: mol_type = other RNA
atttttaaactgatgcttcat

SEQ ID NO: 2952 - RNA, 21 nt, synthetic construct
  source 1..21: mol_type = other RNA
atttttacacatactctgtgc

SEQ ID NO: 2953 - RNA, 21 nt, synthetic construct
  source 1..21: mol_type = other RNA
attttttaaaactgccagtaa

SEQ ID NO: 2954 - RNA, 21 nt, synthetic construct
  source 1..21: mol_type = other RNA
attttttaccacagtatcact

SEQ ID NO: 2955 - RNA, 21 nt, synthetic construct
  source 1..21: mol_type = other RNA
caaaactaaaaatcgtcagca

SEQ ID NO: 2956 - RNA, 21 nt, synthetic construct
  source 1..21: mol_type = other RNA
caaaataatttggagtaaatg

SEQ ID NO: 2957 - RNA, 21 nt, synthetic construct
  source 1..21: mol_type = other RNA
caaaatatttacttaggattc

SEQ ID NO: 2958 - RNA, 21 nt, synthetic construct
  source 1..21: mol_type = other RNA
caaaatgaagcatcagtttaa

SEQ ID NO: 2959 - RNA, 21 nt, synthetic construct
  source 1..21: mol_type = other RNA
caaaatggctcctctcttccc

SEQ ID NO: 2960 - RNA, 21 nt, synthetic construct
  source 1..21: mol_type = other RNA
caaaattggacaatttcaaat

SEQ ID NO: 2961 - RNA, 21 nt, synthetic construct
  source 1..21: mol_type = other RNA
caaacatttactccaaattat

SEQ ID NO: 2962 - RNA, 21 nt, synthetic construct
  source 1..21: mol_type = other RNA
caaagacccagtccctaaatt

SEQ ID NO: 2963 - RNA, 21 nt, synthetic construct
  source 1..21: mol_type = other RNA
caaaggtaggtcaccatataa

SEQ ID NO: 2964 - RNA, 21 nt, synthetic construct
  source 1..21: mol_type = other RNA
caaataaggtatagtgatacc

SEQ ID NO: 2965 - RNA, 21 nt, synthetic construct
  source 1..21: mol_type = other RNA
caaataattgtaaaggaatct

SEQ ID NO: 2966 - RNA, 21 nt, synthetic construct
  source 1..21: mol_type = other RNA
caaatagaggaagcaactcat

SEQ ID NO: 2967 - RNA, 21 nt, synthetic construct
  source 1..21: mol_type = other RNA
caaatatgttcattcttactg

SEQ ID NO: 2968 - RNA, 21 nt, synthetic construct
  source 1..21: mol_type = other RNA
caaatggagatgactactaag

SEQ ID NO: 2969 - RNA, 21 nt, synthetic construct
  source 1..21: mol_type = other RNA
caaattatccaatatacatgt

SEQ ID NO: 2970 - RNA, 21 nt, synthetic construct
  source 1..21: mol_type = other RNA
caaatttttaaactgatgctt

SEQ ID NO: 2971 - RNA, 21 nt, synthetic construct
  source 1..21: mol_type = other RNA
caaattttttaccacagtatc

SEQ ID NO: 2972 - RNA, 21 nt, synthetic construct
  source 1..21: mol_type = other RNA
caacagatccctaaatcccta

SEQ ID NO: 2973 - RNA, 21 nt, synthetic construct
  source 1..21: mol_type = other RNA
caacatttaagaactgtacaa

SEQ ID NO: 2974 - RNA, 21 nt, synthetic construct
  source 1..21: mol_type = other RNA
caactttcccagtttaaaaaa

SEQ ID NO: 2975 - RNA, 21 nt, synthetic construct
  source 1..21: mol_type = other RNA
caagagtactagttttttaaa

SEQ ID NO: 2976 - RNA, 21 nt, synthetic construct
  source 1..21: mol_type = other RNA
caagattcctttacaattatt

SEQ ID NO: 2977 - RNA, 21 nt, synthetic construct
  source 1..21: mol_type = other RNA
caagcatgtatatatgtttaa

SEQ ID NO: 2978 - RNA, 21 nt, synthetic construct
  source 1..21: mol_type = other RNA
caagctttctcttaaggattt

SEQ ID NO: 2979 - RNA, 21 nt, synthetic construct
  source 1..21: mol_type = other RNA
caagtagaaataaacctcgta

SEQ ID NO: 2980 - RNA, 21 nt, synthetic construct
  source 1..21: mol_type = other RNA
caagtgatactgtggtaaaaa

SEQ ID NO: 2981 - RNA, 21 nt, synthetic construct
  source 1..21: mol_type = other RNA
caagttaatgtggtctaataa

SEQ ID NO: 2982 - RNA, 21 nt, synthetic construct
  source 1..21: mol_type = other RNA
caagttactgaacgtttaaac

SEQ ID NO: 2983 - RNA, 21 nt, synthetic construct
  source 1..21: mol_type = other RNA
caagttatatggtgacctacc

SEQ ID NO: 2984 - RNA, 21 nt, synthetic construct
  source 1..21: mol_type = other RNA
caagtttagagttttaacaag

SEQ ID NO: 2985 - RNA, 21 nt, synthetic construct
  source 1..21: mol_type = other RNA
caataaacaaagacccagtcc

SEQ ID NO: 2986 - RNA, 21 nt, synthetic construct
  source 1..21: mol_type = other RNA
caatacttagcattatgtatt

SEQ ID NO: 2987 - RNA, 21 nt, synthetic construct
  source 1..21: mol_type = other RNA
caataggtgaacttattaaat

SEQ ID NO: 2988 - RNA, 21 nt, synthetic construct
  source 1..21: mol_type = other RNA
caatcacataaccttaaagaa

SEQ ID NO: 2989 - RNA, 21 nt, synthetic construct
  source 1..21: mol_type = other RNA
caatgtgacttagtagtcatc

SEQ ID NO: 2990 - RNA, 21 nt, synthetic construct
  source 1..21: mol_type = other RNA
caattaccagtcctctgtatt

SEQ ID NO: 2991 - RNA, 21 nt, synthetic construct
  source 1..21: mol_type = other RNA
caattttagatggtcacaatc

SEQ ID NO: 2992 - RNA, 21 nt, synthetic construct
  source 1..21: mol_type = other RNA
caattttgggggaagagagga

SEQ ID NO: 2993 - RNA, 21 nt, synthetic construct
  source 1..21: mol_type = other RNA
cacaaatatgttcattcttac

SEQ ID NO: 2994 - RNA, 21 nt, synthetic construct
  source 1..21: mol_type = other RNA
cacaacagatccctaaatccc

SEQ ID NO: 2995 - RNA, 21 nt, synthetic construct
  source 1..21: mol_type = other RNA
cacaactttcccagtttaaaa

SEQ ID NO: 2996 - RNA, 21 nt, synthetic construct
  source 1..21: mol_type = other RNA
cacaatctagattataatcaa

SEQ ID NO: 2997 - RNA, 21 nt, synthetic construct
  source 1..21: mol_type = other RNA
cacagactaagctgtcgaaat

SEQ ID NO: 2998 - RNA, 21 nt, synthetic construct
  source 1..21: mol_type = other RNA
cacagagtatgtgtaaaaatc

SEQ ID NO: 2999 - RNA, 21 nt, synthetic construct
  source 1..21: mol_type = other RNA
cacagcatatttaggggaaat

SEQ ID NO: 3000 - RNA, 21 nt, synthetic construct
  source 1..21: mol_type = other RNA
cacagtatcacttgtcagaat

SEQ ID NO: 3001 - RNA, 21 nt, synthetic construct
  source 1..21: mol_type = other RNA
cacataaccttaaagaatacc

SEQ ID NO: 3002 - RNA, 21 nt, synthetic construct
  source 1..21: mol_type = other RNA
cacatactctgtgctgacgat

SEQ ID NO: 3003 - RNA, 21 nt, synthetic construct
  source 1..21: mol_type = other RNA
cacatagatcatacatatctt

SEQ ID NO: 3004 - RNA, 21 nt, synthetic construct
  source 1..21: mol_type = other RNA
cacatcacaaaatttaaaaca

SEQ ID NO: 3005 - RNA, 21 nt, synthetic construct
  source 1..21: mol_type = other RNA
cacattaacttggaatgaggt

SEQ ID NO: 3006 - RNA, 21 nt, synthetic construct
  source 1..21: mol_type = other RNA
cacattgactttaacatgagg

SEQ ID NO: 3007 - RNA, 21 nt, synthetic construct
  source 1..21: mol_type = other RNA
caccatataacttgggcacta

SEQ ID NO: 3008 - RNA, 21 nt, synthetic construct
  source 1..21: mol_type = other RNA
cacctattgattataatctag

SEQ ID NO: 3009 - RNA, 21 nt, synthetic construct
  source 1..21: mol_type = other RNA
cacgaatgtattagaatcaca

SEQ ID NO: 3010 - RNA, 21 nt, synthetic construct
  source 1..21: mol_type = other RNA
cactataccttatttgttaaa

SEQ ID NO: 3011 - RNA, 21 nt, synthetic construct
  source 1..21: mol_type = other RNA
cactatatcctttaacaaatg

SEQ ID NO: 3012 - RNA, 21 nt, synthetic construct
  source 1..21: mol_type = other RNA
cactgtctatttaagattaaa

SEQ ID NO: 3013 - RNA, 21 nt, synthetic construct
  source 1..21: mol_type = other RNA
cacttaatactatgaaaacaa

SEQ ID NO: 3014 - RNA, 21 nt, synthetic construct
  source 1..21: mol_type = other RNA
cacttgtcagaatttattttt

SEQ ID NO: 3015 - RNA, 21 nt, synthetic construct
  source 1..21: mol_type = other RNA
cagaataccaaaatggctcct

SEQ ID NO: 3016 - RNA, 21 nt, synthetic construct
  source 1..21: mol_type = other RNA
cagactaagctgtcgaaatta

SEQ ID NO: 3017 - RNA, 21 nt, synthetic construct
  source 1..21: mol_type = other RNA
cagaggactggtaattgtaca

SEQ ID NO: 3018 - RNA, 21 nt, synthetic construct
  source 1..21: mol_type = other RNA
cagagtatgtgtaaaaatctg

SEQ ID NO: 3019 - RNA, 21 nt, synthetic construct
  source 1..21: mol_type = other RNA
cagatccctaaatccctaaat

SEQ ID NO: 3020 - RNA, 21 nt, synthetic construct
  source 1..21: mol_type = other RNA
cagattacagtaagaatgaac

SEQ ID NO: 3021 - RNA, 21 nt, synthetic construct
  source 1..21: mol_type = other RNA
cagattattagaccacattaa

SEQ ID NO: 3022 - RNA, 21 nt, synthetic construct
  source 1..21: mol_type = other RNA
cagatttttacacatactctg

SEQ ID NO: 3023 - RNA, 21 nt, synthetic construct
  source 1..21: mol_type = other RNA
cagcacagagtatgtgtaaaa

SEQ ID NO: 3024 - RNA, 21 nt, synthetic construct
  source 1..21: mol_type = other RNA
cagcatatttaggggaaatat

SEQ ID NO: 3025 - RNA, 21 nt, synthetic construct
  source 1..21: mol_type = other RNA
cagcctgacaagcatgtatat

SEQ ID NO: 3026 - RNA, 21 nt, synthetic construct
  source 1..21: mol_type = other RNA
cagcgaacttattttaataca

SEQ ID NO: 3027 - RNA, 21 nt, synthetic construct
  source 1..21: mol_type = other RNA
cagcgttaatttcgacagctt

SEQ ID NO: 3028 - RNA, 21 nt, synthetic construct
  source 1..21: mol_type = other RNA
cagcttagtctgtggtcctga

SEQ ID NO: 3029 - RNA, 21 nt, synthetic construct
  source 1..21: mol_type = other RNA
caggaccacagactaagctgt

SEQ ID NO: 3030 - RNA, 21 nt, synthetic construct
  source 1..21: mol_type = other RNA
caggctgtttaaacgttcagt

SEQ ID NO: 3031 - RNA, 21 nt, synthetic construct
  source 1..21: mol_type = other RNA
cagtaacttgttacgaggttt

SEQ ID NO: 3032 - RNA, 21 nt, synthetic construct
  source 1..21: mol_type = other RNA
cagtaagaatgaacatatttg

SEQ ID NO: 3033 - RNA, 21 nt, synthetic construct
  source 1..21: mol_type = other RNA
cagtatcacttgtcagaattt

SEQ ID NO: 3034 - RNA, 21 nt, synthetic construct
  source 1..21: mol_type = other RNA
cagtatttaattctgcttcat

SEQ ID NO: 3035 - RNA, 21 nt, synthetic construct
  source 1..21: mol_type = other RNA
cagtccctaaattatagaaat

SEQ ID NO: 3036 - RNA, 21 nt, synthetic construct
  source 1..21: mol_type = other RNA
cagtcctctgtatttagtcaa

SEQ ID NO: 3037 - RNA, 21 nt, synthetic construct
  source 1..21: mol_type = other RNA
cagtgactttaagataaaaaa

SEQ ID NO: 3038 - RNA, 21 nt, synthetic construct
  source 1..21: mol_type = other RNA
cagttcttaaatgttgtagta

SEQ ID NO: 3039 - RNA, 21 nt, synthetic construct
  source 1..21: mol_type = other RNA
cagtttaaaaaactagtactc

SEQ ID NO: 3040 - RNA, 21 nt, synthetic construct
  source 1..21: mol_type = other RNA
cataaccttaaagaataccgt

SEQ ID NO: 3041 - RNA, 21 nt, synthetic construct
  source 1..21: mol_type = other RNA
cataatgctaagtattgacaa

SEQ ID NO: 3042 - RNA, 21 nt, synthetic construct
  source 1..21: mol_type = other RNA
catacaatcacataaccttaa

SEQ ID NO: 3043 - RNA, 21 nt, synthetic construct
  source 1..21: mol_type = other RNA
catactctgtgctgacgattt

SEQ ID NO: 3044 - RNA, 21 nt, synthetic construct
  source 1..21: mol_type = other RNA
catagatcatacatatctttt

SEQ ID NO: 3045 - RNA, 21 nt, synthetic construct
  source 1..21: mol_type = other RNA
catataacttgggcactatat

SEQ ID NO: 3046 - RNA, 21 nt, synthetic construct
  source 1..21: mol_type = other RNA
catatatacatgcttgtcagg

SEQ ID NO: 3047 - RNA, 21 nt, synthetic construct
  source 1..21: mol_type = other RNA
catatcaaacatttactccaa

SEQ ID NO: 3048 - RNA, 21 nt, synthetic construct
  source 1..21: mol_type = other RNA
catatcttttatatatgtgac

SEQ ID NO: 3049 - RNA, 21 nt, synthetic construct
  source 1..21: mol_type = other RNA
catatgagctaatatcacaac

SEQ ID NO: 3050 - RNA, 21 nt, synthetic construct
  source 1..21: mol_type = other RNA
catatgatgccttttaaaata

SEQ ID NO: 3051 - RNA, 21 nt, synthetic construct
  source 1..21: mol_type = other RNA
catatttaggggaaatataaa

SEQ ID NO: 3052 - RNA, 21 nt, synthetic construct
  source 1..21: mol_type = other RNA
catatttgtggcatcgagtta

SEQ ID NO: 3053 - RNA, 21 nt, synthetic construct
  source 1..21: mol_type = other RNA
catcacaacagatccctaaat

SEQ ID NO: 3054 - RNA, 21 nt, synthetic construct
  source 1..21: mol_type = other RNA
catcatatgagctaatatcac

SEQ ID NO: 3055 - RNA, 21 nt, synthetic construct
  source 1..21: mol_type = other RNA
catcgagttaaagtttatatt

SEQ ID NO: 3056 - RNA, 21 nt, synthetic construct
  source 1..21: mol_type = other RNA
catctaaaattgattcccaca

SEQ ID NO: 3057 - RNA, 21 nt, synthetic construct
  source 1..21: mol_type = other RNA
catctccatttgtttaaagac

SEQ ID NO: 3058 - RNA, 21 nt, synthetic construct
  source 1..21: mol_type = other RNA
catgaggtatcactatacctt

SEQ ID NO: 3059 - RNA, 21 nt, synthetic construct
  source 1..21: mol_type = other RNA
catgcttgtcaggctgtttaa

SEQ ID NO: 3060 - RNA, 21 nt, synthetic construct
  source 1..21: mol_type = other RNA
catgtatattggataatttga

SEQ ID NO: 3061 - RNA, 21 nt, synthetic construct
  source 1..21: mol_type = other RNA
catgttaaagtcaatgtgact

SEQ ID NO: 3062 - RNA, 21 nt, synthetic construct
  source 1..21: mol_type = other RNA
catgtttatcgacatcacaac

SEQ ID NO: 3063 - RNA, 21 nt, synthetic construct
  source 1..21: mol_type = other RNA
cattaacctcattccaagtta

SEQ ID NO: 3064 - RNA, 21 nt, synthetic construct
  source 1..21: mol_type = other RNA
cattaacttggaatgaggtta

SEQ ID NO: 3065 - RNA, 21 nt, synthetic construct
  source 1..21: mol_type = other RNA
cattccaagttaatgtggtct

SEQ ID NO: 3066 - RNA, 21 nt, synthetic construct
  source 1..21: mol_type = other RNA
cattcgtgtaggttttcaagt

SEQ ID NO: 3067 - RNA, 21 nt, synthetic construct
  source 1..21: mol_type = other RNA
cattcttactgtaatctgaca

SEQ ID NO: 3068 - RNA, 21 nt, synthetic construct
  source 1..21: mol_type = other RNA
cattgactttaacatgaggta

SEQ ID NO: 3069 - RNA, 21 nt, synthetic construct
  source 1..21: mol_type = other RNA
catttaagaactgtacaatta

SEQ ID NO: 3070 - RNA, 21 nt, synthetic construct
  source 1..21: mol_type = other RNA
catttactccaaattattttg

SEQ ID NO: 3071 - RNA, 21 nt, synthetic construct
  source 1..21: mol_type = other RNA
catttctcaatcaaaattctt

SEQ ID NO: 3072 - RNA, 21 nt, synthetic construct
  source 1..21: mol_type = other RNA
catttgaaattgtccaatttt

SEQ ID NO: 3073 - RNA, 21 nt, synthetic construct
  source 1..21: mol_type = other RNA
catttgttaaaggatatagtg

SEQ ID NO: 3074 - RNA, 21 nt, synthetic construct
  source 1..21: mol_type = other RNA
catttgtttaaagacagcgaa

SEQ ID NO: 3075 - RNA, 21 nt, synthetic construct
  source 1..21: mol_type = other RNA
cattttggtattctggcccta

SEQ ID NO: 3076 - RNA, 21 nt, synthetic construct
  source 1..21: mol_type = other RNA
ccaaaatggctcctctcttcc

SEQ ID NO: 3077 - RNA, 21 nt, synthetic construct
  source 1..21: mol_type = other RNA
ccaaaattggacaatttcaaa

SEQ ID NO: 3078 - RNA, 21 nt, synthetic construct
  source 1..21: mol_type = other RNA
ccaaatagaggaagcaactca

SEQ ID NO: 3079 - RNA, 21 nt, synthetic construct
  source 1..21: mol_type = other RNA
ccaaattattttgtagcaaaa

SEQ ID NO: 3080 - RNA, 21 nt, synthetic construct
  source 1..21: mol_type = other RNA
ccaagttaatgtggtctaata

SEQ ID NO: 3081 - RNA, 21 nt, synthetic construct
  source 1..21: mol_type = other RNA
ccaagttatatggtgacctac

SEQ ID NO: 3082 - RNA, 21 nt, synthetic construct
  source 1..21: mol_type = other RNA
ccaatatacatgtcatatata

SEQ ID NO: 3083 - RNA, 21 nt, synthetic construct
  source 1..21: mol_type = other RNA
ccaattttgggggaagagagg

SEQ ID NO: 3084 - RNA, 21 nt, synthetic construct
  source 1..21: mol_type = other RNA
ccacaaatatgttcattctta

SEQ ID NO: 3085 - RNA, 21 nt, synthetic construct
  source 1..21: mol_type = other RNA
ccacagactaagctgtcgaaa

SEQ ID NO: 3086 - RNA, 21 nt, synthetic construct
  source 1..21: mol_type = other RNA
ccacagtatcacttgtcagaa

SEQ ID NO: 3087 - RNA, 21 nt, synthetic construct
  source 1..21: mol_type = other RNA
ccacatcacaaaatttaaaac

SEQ ID NO: 3088 - RNA, 21 nt, synthetic construct
  source 1..21: mol_type = other RNA
ccacattaacttggaatgagg

SEQ ID NO: 3089 - RNA, 21 nt, synthetic construct
  source 1..21: mol_type = other RNA
ccagaaaagtacaaaataata

SEQ ID NO: 3090 - RNA, 21 nt, synthetic construct
  source 1..21: mol_type = other RNA
ccagaataccaaaatggctcc

SEQ ID NO: 3091 - RNA, 21 nt, synthetic construct
  source 1..21: mol_type = other RNA
ccagattattagaccacatta

SEQ ID NO: 3092 - RNA, 21 nt, synthetic construct
  source 1..21: mol_type = other RNA
ccagtccctaaattatagaaa

SEQ ID NO: 3093 - RNA, 21 nt, synthetic construct
  source 1..21: mol_type = other RNA
ccagtcctctgtatttagtca

SEQ ID NO: 3094 - RNA, 21 nt, synthetic construct
  source 1..21: mol_type = other RNA
ccagtttaaaaaactagtact

SEQ ID NO: 3095 - RNA, 21 nt, synthetic construct
  source 1..21: mol_type = other RNA
ccatataacttgggcactata

SEQ ID NO: 3096 - RNA, 21 nt, synthetic construct
  source 1..21: mol_type = other RNA
ccatctaaaattgattcccac

SEQ ID NO: 3097 - RNA, 21 nt, synthetic construct
  source 1..21: mol_type = other RNA
ccatttgttaaaggatatagt

SEQ ID NO: 3098 - RNA, 21 nt, synthetic construct
  source 1..21: mol_type = other RNA
ccatttgtttaaagacagcga

SEQ ID NO: 3099 - RNA, 21 nt, synthetic construct
  source 1..21: mol_type = other RNA
ccattttggtattctggccct

SEQ ID NO: 3100 - RNA, 21 nt, synthetic construct
  source 1..21: mol_type = other RNA
cccaaaattggacaatttcaa

SEQ ID NO: 3101 - RNA, 21 nt, synthetic construct
  source 1..21: mol_type = other RNA
cccaagttatatggtgaccta

SEQ ID NO: 3102 - RNA, 21 nt, synthetic construct
  source 1..21: mol_type = other RNA
cccacatcacaaaatttaaaa

SEQ ID NO: 3103 - RNA, 21 nt, synthetic construct
  source 1..21: mol_type = other RNA
cccagtccctaaattatagaa

SEQ ID NO: 3104 - RNA, 21 nt, synthetic construct
  source 1..21: mol_type = other RNA
cccagtttaaaaaactagtac

SEQ ID NO: 3105 - RNA, 21 nt, synthetic construct
  source 1..21: mol_type = other RNA
cccatttgttaaaggatatag

SEQ ID NO: 3106 - RNA, 21 nt, synthetic construct
  source 1..21: mol_type = other RNA
ccccaaaattggacaatttca

SEQ ID NO: 3107 - RNA, 21 nt, synthetic construct
  source 1..21: mol_type = other RNA
cccccaaaattggacaatttc

SEQ ID NO: 3108 - RNA, 21 nt, synthetic construct
  source 1..21: mol_type = other RNA
cccctaaatatgctgtgattc

SEQ ID NO: 3109 - RNA, 21 nt, synthetic construct
  source 1..21: mol_type = other RNA
ccctaaagattagatacaaat

SEQ ID NO: 3110 - RNA, 21 nt, synthetic construct
  source 1..21: mol_type = other RNA
ccctaaatatgctgtgattct

SEQ ID NO: 3111 - RNA, 21 nt, synthetic construct
  source 1..21: mol_type = other RNA
ccctaaatccctaaagattag

SEQ ID NO: 3112 - RNA, 21 nt, synthetic construct
  source 1..21: mol_type = other RNA
ccctaaatccctaaatcccta

SEQ ID NO: 3113 - RNA, 21 nt, synthetic construct
  source 1..21: mol_type = other RNA
ccgtttacatttctcaatcaa

SEQ ID NO: 3114 - RNA, 21 nt, synthetic construct
  source 1..21: mol_type = other RNA
cctaaagattagatacaaatt

SEQ ID NO: 3115 - RNA, 21 nt, synthetic construct
  source 1..21: mol_type = other RNA
cctaaatatgctgtgattcta

SEQ ID NO: 3116 - RNA, 21 nt, synthetic construct
  source 1..21: mol_type = other RNA
cctaaatccctaaagattaga

SEQ ID NO: 3117 - RNA, 21 nt, synthetic construct
  source 1..21: mol_type = other RNA
cctaaatccctaaatccctaa

SEQ ID NO: 3118 - RNA, 21 nt, synthetic construct
  source 1..21: mol_type = other RNA
cctaagtaaatattttgttcc

SEQ ID NO: 3119 - RNA, 21 nt, synthetic construct
  source 1..21: mol_type = other RNA
cctaatgaagcagaattaaat

SEQ ID NO: 3120 - RNA, 21 nt, synthetic construct
  source 1..21: mol_type = other RNA
cctacacgaatgtattagaat

SEQ ID NO: 3121 - RNA, 21 nt, synthetic construct
  source 1..21: mol_type = other RNA
cctacctttgtcaatacttag

SEQ ID NO: 3122 - RNA, 21 nt, synthetic construct
  source 1..21: mol_type = other RNA
cctattgattataatctagat

SEQ ID NO: 3123 - RNA, 21 nt, synthetic construct
  source 1..21: mol_type = other RNA
cctcatgttaaagtcaatgtg

SEQ ID NO: 3124 - RNA, 21 nt, synthetic construct
  source 1..21: mol_type = other RNA
cctcattccaagttaatgtgg

SEQ ID NO: 3125 - RNA, 21 nt, synthetic construct
  source 1..21: mol_type = other RNA
cctcgtaacaagttactgaac

SEQ ID NO: 3126 - RNA, 21 nt, synthetic construct
  source 1..21: mol_type = other RNA
cctctcttcccccaaaattgg

SEQ ID NO: 3127 - RNA, 21 nt, synthetic construct
  source 1..21: mol_type = other RNA
cctctgtatttagtcaagttt

SEQ ID NO: 3128 - RNA, 21 nt, synthetic construct
  source 1..21: mol_type = other RNA
cctgacaagcatgtatatatg

SEQ ID NO: 3129 - RNA, 21 nt, synthetic construct
  source 1..21: mol_type = other RNA
ccttaaagaataccgtttaca

SEQ ID NO: 3130 - RNA, 21 nt, synthetic construct
  source 1..21: mol_type = other RNA
ccttaagagaaagcttgagaa

SEQ ID NO: 3131 - RNA, 21 nt, synthetic construct
  source 1..21: mol_type = other RNA
cctttaacaaatgggtttaat

SEQ ID NO: 3132 - RNA, 21 nt, synthetic construct
  source 1..21: mol_type = other RNA
cctttacaattatttgttttc

SEQ ID NO: 3133 - RNA, 21 nt, synthetic construct
  source 1..21: mol_type = other RNA
cctttgtcaatacttagcatt

SEQ ID NO: 3134 - RNA, 21 nt, synthetic construct
  source 1..21: mol_type = other RNA
ccttttaaaataaaagtctct

SEQ ID NO: 3135 - RNA, 21 nt, synthetic construct
  source 1..21: mol_type = other RNA
cgaaattaacgctgatttttt

SEQ ID NO: 3136 - RNA, 21 nt, synthetic construct
  source 1..21: mol_type = other RNA
cgaacttattttaatacagta

SEQ ID NO: 3137 - RNA, 21 nt, synthetic construct
  source 1..21: mol_type = other RNA
cgaatgtattagaatcacagc

SEQ ID NO: 3138 - RNA, 21 nt, synthetic construct
  source 1..21: mol_type = other RNA
cgacagcttagtctgtggtcc

SEQ ID NO: 3139 - RNA, 21 nt, synthetic construct
  source 1..21: mol_type = other RNA
cgacatcacaacagatcccta

SEQ ID NO: 3140 - RNA, 21 nt, synthetic construct
  source 1..21: mol_type = other RNA
cgaggtttatttctacttgaa

SEQ ID NO: 3141 - RNA, 21 nt, synthetic construct
  source 1..21: mol_type = other RNA
cgagttaaagtttatatttcc

SEQ ID NO: 3142 - RNA, 21 nt, synthetic construct
  source 1..21: mol_type = other RNA
cgataaacatgcaagaataat

SEQ ID NO: 3143 - RNA, 21 nt, synthetic construct
  source 1..21: mol_type = other RNA
cgatgccacaaatatgttcat

SEQ ID NO: 3144 - RNA, 21 nt, synthetic construct
  source 1..21: mol_type = other RNA
cgctgtctttaaacaaatgga

SEQ ID NO: 3145 - RNA, 21 nt, synthetic construct
  source 1..21: mol_type = other RNA
cggtattctttaaggttatgt

SEQ ID NO: 3146 - RNA, 21 nt, synthetic construct
  source 1..21: mol_type = other RNA
cgtaacaagttactgaacgtt

SEQ ID NO: 3147 - RNA, 21 nt, synthetic construct
  source 1..21: mol_type = other RNA
cgtcagcacagagtatgtgta

SEQ ID NO: 3148 - RNA, 21 nt, synthetic construct
  source 1..21: mol_type = other RNA
cgtgtaggttttcaagtagaa

SEQ ID NO: 3149 - RNA, 21 nt, synthetic construct
  source 1..21: mol_type = other RNA
cgttaatttcgacagcttagt

SEQ ID NO: 3150 - RNA, 21 nt, synthetic construct
  source 1..21: mol_type = other RNA
cgttcagtaacttgttacgag

SEQ ID NO: 3151 - RNA, 21 nt, synthetic construct
  source 1..21: mol_type = other RNA
cgtttaaacagcctgacaagc

SEQ ID NO: 3152 - RNA, 21 nt, synthetic construct
  source 1..21: mol_type = other RNA
cgtttacatttctcaatcaaa

SEQ ID NO: 3153 - RNA, 21 nt, synthetic construct
  source 1..21: mol_type = other RNA
ctaaaaatcgtcagcacagag

SEQ ID NO: 3154 - RNA, 21 nt, synthetic construct
  source 1..21: mol_type = other RNA
ctaaaattgattcccacatca

SEQ ID NO: 3155 - RNA, 21 nt, synthetic construct
  source 1..21: mol_type = other RNA
ctaaacttgactaaatacaga

SEQ ID NO: 3156 - RNA, 21 nt, synthetic construct
  source 1..21: mol_type = other RNA
ctaaatacagaggactggtaa

SEQ ID NO: 3157 - RNA, 21 nt, synthetic construct
  source 1..21: mol_type = other RNA
ctaaatatgctgtgattctaa

SEQ ID NO: 3158 - RNA, 21 nt, synthetic construct
  source 1..21: mol_type = other RNA
ctaaatccctaaagattagat

SEQ ID NO: 3159 - RNA, 21 nt, synthetic construct
  source 1..21: mol_type = other RNA
ctaaatccctaaatccctaaa

SEQ ID NO: 3160 - RNA, 21 nt, synthetic construct
  source 1..21: mol_type = other RNA
ctaagctgtcgaaattaacgc

SEQ ID NO: 3161 - RNA, 21 nt, synthetic construct
  source 1..21: mol_type = other RNA
ctaagtaaatattttgttcca

SEQ ID NO: 3162 - RNA, 21 nt, synthetic construct
  source 1..21: mol_type = other RNA
ctaagtattgacaaaggtagg

SEQ ID NO: 3163 - RNA, 21 nt, synthetic construct
  source 1..21: mol_type = other RNA
ctaagtcacattgactttaac

SEQ ID NO: 3164 - RNA, 21 nt, synthetic construct
  source 1..21: mol_type = other RNA
ctaataatctggtattaaatc

SEQ ID NO: 3165 - RNA, 21 nt, synthetic construct
  source 1..21: mol_type = other RNA
ctaatacattcgtgtaggttt

SEQ ID NO: 3166 - RNA, 21 nt, synthetic construct
  source 1..21: mol_type = other RNA
ctaatatcacaactttcccag

SEQ ID NO: 3167 - RNA, 21 nt, synthetic construct
  source 1..21: mol_type = other RNA
ctaatctttagggatttaggg

SEQ ID NO: 3168 - RNA, 21 nt, synthetic construct
  source 1..21: mol_type = other RNA
ctaatgaagcagaattaaata

SEQ ID NO: 3169 - RNA, 21 nt, synthetic construct
  source 1..21: mol_type = other RNA
ctacaaaataatttggagtaa

SEQ ID NO: 3170 - RNA, 21 nt, synthetic construct
  source 1..21: mol_type = other RNA
ctacaacatttaagaactgta

SEQ ID NO: 3171 - RNA, 21 nt, synthetic construct
  source 1..21: mol_type = other RNA
ctacacgaatgtattagaatc

SEQ ID NO: 3172 - RNA, 21 nt, synthetic construct
  source 1..21: mol_type = other RNA
ctacctttgtcaatacttagc

SEQ ID NO: 3173 - RNA, 21 nt, synthetic construct
  source 1..21: mol_type = other RNA
ctactaagtcacattgacttt

SEQ ID NO: 3174 - RNA, 21 nt, synthetic construct
  source 1..21: mol_type = other RNA
ctacttgaaaacctacacgaa

SEQ ID NO: 3175 - RNA, 21 nt, synthetic construct
  source 1..21: mol_type = other RNA
ctagattataatcaataggtg

SEQ ID NO: 3176 - RNA, 21 nt, synthetic construct
  source 1..21: mol_type = other RNA
ctagattgtgaccatctaaaa

SEQ ID NO: 3177 - RNA, 21 nt, synthetic construct
  source 1..21: mol_type = other RNA
ctagtactcttgttaaaactc

SEQ ID NO: 3178 - RNA, 21 nt, synthetic construct
  source 1..21: mol_type = other RNA
ctagttttttaaactgggaaa

SEQ ID NO: 3179 - RNA, 21 nt, synthetic construct
  source 1..21: mol_type = other RNA
ctataatttagggactgggtc

SEQ ID NO: 3180 - RNA, 21 nt, synthetic construct
  source 1..21: mol_type = other RNA
ctataattttcaggaccacag

SEQ ID NO: 3181 - RNA, 21 nt, synthetic construct
  source 1..21: mol_type = other RNA
ctatatcctttaacaaatggg

SEQ ID NO: 3182 - RNA, 21 nt, synthetic construct
  source 1..21: mol_type = other RNA
ctatgtgaatcctaagtaaat

SEQ ID NO: 3183 - RNA, 21 nt, synthetic construct
  source 1..21: mol_type = other RNA
ctatttctcaagctttctctt

SEQ ID NO: 3184 - RNA, 21 nt, synthetic construct
  source 1..21: mol_type = other RNA
ctcaagctttctcttaaggat

SEQ ID NO: 3185 - RNA, 21 nt, synthetic construct
  source 1..21: mol_type = other RNA
ctcatatgatgccttttaaaa

SEQ ID NO: 3186 - RNA, 21 nt, synthetic construct
  source 1..21: mol_type = other RNA
ctcatgttaaagtcaatgtga

SEQ ID NO: 3187 - RNA, 21 nt, synthetic construct
  source 1..21: mol_type = other RNA
ctcattccaagttaatgtggt

SEQ ID NO: 3188 - RNA, 21 nt, synthetic construct
  source 1..21: mol_type = other RNA
ctccaaattattttgtagcaa

SEQ ID NO: 3189 - RNA, 21 nt, synthetic construct
  source 1..21: mol_type = other RNA
ctccatttgtttaaagacagc

SEQ ID NO: 3190 - RNA, 21 nt, synthetic construct
  source 1..21: mol_type = other RNA
ctcctctcttcccccaaaatt

SEQ ID NO: 3191 - RNA, 21 nt, synthetic construct
  source 1..21: mol_type = other RNA
ctcgatgccacaaatatgttc

SEQ ID NO: 3192 - RNA, 21 nt, synthetic construct
  source 1..21: mol_type = other RNA
ctcgtaacaagttactgaacg

SEQ ID NO: 3193 - RNA, 21 nt, synthetic construct
  source 1..21: mol_type = other RNA
ctctaaacttgactaaataca

SEQ ID NO: 3194 - RNA, 21 nt, synthetic construct
  source 1..21: mol_type = other RNA
ctctcttcccccaaaattgga

SEQ ID NO: 3195 - RNA, 21 nt, synthetic construct
  source 1..21: mol_type = other RNA
ctctgtatttagtcaagttta

SEQ ID NO: 3196 - RNA, 21 nt, synthetic construct
  source 1..21: mol_type = other RNA
ctctgtgctgacgatttttag

SEQ ID NO: 3197 - RNA, 21 nt, synthetic construct
  source 1..21: mol_type = other RNA
ctcttaaggatttaataccag

SEQ ID NO: 3198 - RNA, 21 nt, synthetic construct
  source 1..21: mol_type = other RNA
ctcttcccccaaaattggaca

SEQ ID NO: 3199 - RNA, 21 nt, synthetic construct
  source 1..21: mol_type = other RNA
ctcttgttaaaactctaaact

SEQ ID NO: 3200 - RNA, 21 nt, synthetic construct
  source 1..21: mol_type = other RNA
ctgaacgtttaaacagcctga

SEQ ID NO: 3201 - RNA, 21 nt, synthetic construct
  source 1..21: mol_type = other RNA
ctgacaagattcctttacaat

SEQ ID NO: 3202 - RNA, 21 nt, synthetic construct
  source 1..21: mol_type = other RNA
ctgacaagcatgtatatatgt

SEQ ID NO: 3203 - RNA, 21 nt, synthetic construct
  source 1..21: mol_type = other RNA
ctgacaagtgatactgtggta

SEQ ID NO: 3204 - RNA, 21 nt, synthetic construct
  source 1..21: mol_type = other RNA
ctgacgatttttagttttgaa

SEQ ID NO: 3205 - RNA, 21 nt, synthetic construct
  source 1..21: mol_type = other RNA
ctgaggcaaatttaaaaggca

SEQ ID NO: 3206 - RNA, 21 nt, synthetic construct
  source 1..21: mol_type = other RNA
ctgatgcttcattttgctaca

SEQ ID NO: 3207 - RNA, 21 nt, synthetic construct
  source 1..21: mol_type = other RNA
ctgccagtaagaaattttaaa

SEQ ID NO: 3208 - RNA, 21 nt, synthetic construct
  source 1..21: mol_type = other RNA
ctgcttcattaggtttcataa

SEQ ID NO: 3209 - RNA, 21 nt, synthetic construct
  source 1..21: mol_type = other RNA
ctggaacaaaatatttactta

SEQ ID NO: 3210 - RNA, 21 nt, synthetic construct
  source 1..21: mol_type = other RNA
ctggcagttttaaaaaatcat

SEQ ID NO: 3211 - RNA, 21 nt, synthetic construct
  source 1..21: mol_type = other RNA
ctgggaaagttgtgatattag

SEQ ID NO: 3212 - RNA, 21 nt, synthetic construct
  source 1..21: mol_type = other RNA
ctgggtctttgtttattgaat

SEQ ID NO: 3213 - RNA, 21 nt, synthetic construct
  source 1..21: mol_type = other RNA
ctggtaattgtacagttctta

SEQ ID NO: 3214 - RNA, 21 nt, synthetic construct
  source 1..21: mol_type = other RNA
ctggtattaaatccttaagag

SEQ ID NO: 3215 - RNA, 21 nt, synthetic construct
  source 1..21: mol_type = other RNA
ctgtaatctgacaagattcct

SEQ ID NO: 3216 - RNA, 21 nt, synthetic construct
  source 1..21: mol_type = other RNA
ctgtacaattaccagtcctct

SEQ ID NO: 3217 - RNA, 21 nt, synthetic construct
  source 1..21: mol_type = other RNA
ctgtattaaaataagttcgct

SEQ ID NO: 3218 - RNA, 21 nt, synthetic construct
  source 1..21: mol_type = other RNA
ctgtatttagtcaagtttaga

SEQ ID NO: 3219 - RNA, 21 nt, synthetic construct
  source 1..21: mol_type = other RNA
ctgtcgaaattaacgctgatt

SEQ ID NO: 3220 - RNA, 21 nt, synthetic construct
  source 1..21: mol_type = other RNA
ctgtctatttaagattaaaca

SEQ ID NO: 3221 - RNA, 21 nt, synthetic construct
  source 1..21: mol_type = other RNA
ctgtctttaaacaaatggaga

SEQ ID NO: 3222 - RNA, 21 nt, synthetic construct
  source 1..21: mol_type = other RNA
ctgtgattctaatacattcgt

SEQ ID NO: 3223 - RNA, 21 nt, synthetic construct
  source 1..21: mol_type = other RNA
ctgtgctgacgatttttagtt

SEQ ID NO: 3224 - RNA, 21 nt, synthetic construct
  source 1..21: mol_type = other RNA
ctgtggtaaaaaatttgtatc

SEQ ID NO: 3225 - RNA, 21 nt, synthetic construct
  source 1..21: mol_type = other RNA
ctgtggtcctgaaaattatag

SEQ ID NO: 3226 - RNA, 21 nt, synthetic construct
  source 1..21: mol_type = other RNA
ctgttgtgatgtcgataaaca

SEQ ID NO: 3227 - RNA, 21 nt, synthetic construct
  source 1..21: mol_type = other RNA
ctgtttaaacgttcagtaact

SEQ ID NO: 3228 - RNA, 21 nt, synthetic construct
  source 1..21: mol_type = other RNA
cttaaagaataccgtttacat

SEQ ID NO: 3229 - RNA, 21 nt, synthetic construct
  source 1..21: mol_type = other RNA
cttaaagtcactgtctattta

SEQ ID NO: 3230 - RNA, 21 nt, synthetic construct
  source 1..21: mol_type = other RNA
cttaaatagacagtgacttta

SEQ ID NO: 3231 - RNA, 21 nt, synthetic construct
  source 1..21: mol_type = other RNA
cttaagagaaagcttgagaaa

SEQ ID NO: 3232 - RNA, 21 nt, synthetic construct
  source 1..21: mol_type = other RNA
cttaaggatttaataccagat

SEQ ID NO: 3233 - RNA, 21 nt, synthetic construct
  source 1..21: mol_type = other RNA
cttactggcagttttaaaaaa

SEQ ID NO: 3234 - RNA, 21 nt, synthetic construct
  source 1..21: mol_type = other RNA
cttactgtaatctgacaagat

SEQ ID NO: 3235 - RNA, 21 nt, synthetic construct
  source 1..21: mol_type = other RNA
cttagcattatgtatttcaaa

SEQ ID NO: 3236 - RNA, 21 nt, synthetic construct
  source 1..21: mol_type = other RNA
cttaggattcacatagatcat

SEQ ID NO: 3237 - RNA, 21 nt, synthetic construct
  source 1..21: mol_type = other RNA
cttagtagtcatctccatttg

SEQ ID NO: 3238 - RNA, 21 nt, synthetic construct
  source 1..21: mol_type = other RNA
cttagtctgtggtcctgaaaa

SEQ ID NO: 3239 - RNA, 21 nt, synthetic construct
  source 1..21: mol_type = other RNA
cttcattaggtttcataaata

SEQ ID NO: 3240 - RNA, 21 nt, synthetic construct
  source 1..21: mol_type = other RNA
cttcattttgctacaaaataa

SEQ ID NO: 3241 - RNA, 21 nt, synthetic construct
  source 1..21: mol_type = other RNA
cttcccccaaaattggacaat

SEQ ID NO: 3242 - RNA, 21 nt, synthetic construct
  source 1..21: mol_type = other RNA
cttgaaaacctacacgaatgt

SEQ ID NO: 3243 - RNA, 21 nt, synthetic construct
  source 1..21: mol_type = other RNA
cttgactaaatacagaggact

SEQ ID NO: 3244 - RNA, 21 nt, synthetic construct
  source 1..21: mol_type = other RNA
cttgcatgtttatcgacatca

SEQ ID NO: 3245 - RNA, 21 nt, synthetic construct
  source 1..21: mol_type = other RNA
cttggaatgaggttaatgttt

SEQ ID NO: 3246 - RNA, 21 nt, synthetic construct
  source 1..21: mol_type = other RNA
cttgggcactatatcctttaa

SEQ ID NO: 3247 - RNA, 21 nt, synthetic construct
  source 1..21: mol_type = other RNA
cttgtcagattacagtaagaa

SEQ ID NO: 3248 - RNA, 21 nt, synthetic construct
  source 1..21: mol_type = other RNA
cttgtcaggctgtttaaacgt

SEQ ID NO: 3249 - RNA, 21 nt, synthetic construct
  source 1..21: mol_type = other RNA
cttgttaaaactctaaacttg

SEQ ID NO: 3250 - RNA, 21 nt, synthetic construct
  source 1..21: mol_type = other RNA
cttgttacgaggtttatttct

SEQ ID NO: 3251 - RNA, 21 nt, synthetic construct
  source 1..21: mol_type = other RNA
ctttaaacaaatggagatgac

SEQ ID NO: 3252 - RNA, 21 nt, synthetic construct
  source 1..21: mol_type = other RNA
ctttaacaaatgggtttaatt

SEQ ID NO: 3253 - RNA, 21 nt, synthetic construct
  source 1..21: mol_type = other RNA
ctttaacatgaggtatcacta

SEQ ID NO: 3254 - RNA, 21 nt, synthetic construct
  source 1..21: mol_type = other RNA
ctttaactcgatgccacaaat

SEQ ID NO: 3255 - RNA, 21 nt, synthetic construct
  source 1..21: mol_type = other RNA
ctttaaggttatgtgattgta

SEQ ID NO: 3256 - RNA, 21 nt, synthetic construct
  source 1..21: mol_type = other RNA
ctttagggatttagggattta

SEQ ID NO: 3257 - RNA, 21 nt, synthetic construct
  source 1..21: mol_type = other RNA
ctttcccagtttaaaaaacta

SEQ ID NO: 3258 - RNA, 21 nt, synthetic construct
  source 1..21: mol_type = other RNA
ctttctcttaaggatttaata

SEQ ID NO: 3259 - RNA, 21 nt, synthetic construct
  source 1..21: mol_type = other RNA
ctttgtcaatacttagcatta

SEQ ID NO: 3260 - RNA, 21 nt, synthetic construct
  source 1..21: mol_type = other RNA
cttttattttaaaaggcatca

SEQ ID NO: 3261 - RNA, 21 nt, synthetic construct
  source 1..21: mol_type = other RNA
cttttctggaacaaaatattt

SEQ ID NO: 3262 - RNA, 21 nt, synthetic construct
  source 1..21: mol_type = other RNA
gaaaacaaataattgtaaagg

SEQ ID NO: 3263 - RNA, 21 nt, synthetic construct
  source 1..21: mol_type = other RNA
gaaaacctacacgaatgtatt

SEQ ID NO: 3264 - RNA, 21 nt, synthetic construct
  source 1..21: mol_type = other RNA
gaaaccaaatagaggaagcaa

SEQ ID NO: 3265 - RNA, 21 nt, synthetic construct
  source 1..21: mol_type = other RNA
gaaacctaatgaagcagaatt

SEQ ID NO: 3266 - RNA, 21 nt, synthetic construct
  source 1..21: mol_type = other RNA
gaaagcttgagaaatagattt

SEQ ID NO: 3267 - RNA, 21 nt, synthetic construct
  source 1..21: mol_type = other RNA
gaaagttgtgatattagctca

SEQ ID NO: 3268 - RNA, 21 nt, synthetic construct
  source 1..21: mol_type = other RNA
gaaataaacctcgtaacaagt

SEQ ID NO: 3269 - RNA, 21 nt, synthetic construct
  source 1..21: mol_type = other RNA
gaaatacataatgctaagtat

SEQ ID NO: 3270 - RNA, 21 nt, synthetic construct
  source 1..21: mol_type = other RNA
gaaatataaactttaactcga

SEQ ID NO: 3271 - RNA, 21 nt, synthetic construct
  source 1..21: mol_type = other RNA
gaaatgtaaacggtattcttt

SEQ ID NO: 3272 - RNA, 21 nt, synthetic construct
  source 1..21: mol_type = other RNA
gaaattgtccaattttggggg

SEQ ID NO: 3273 - RNA, 21 nt, synthetic construct
  source 1..21: mol_type = other RNA
gaacaaaatatttacttagga

SEQ ID NO: 3274 - RNA, 21 nt, synthetic construct
  source 1..21: mol_type = other RNA
gaacatatttgtggcatcgag

SEQ ID NO: 3275 - RNA, 21 nt, synthetic construct
  source 1..21: mol_type = other RNA
gaacgtttaaacagcctgaca

SEQ ID NO: 3276 - RNA, 21 nt, synthetic construct
  source 1..21: mol_type = other RNA
gaactgtacaattaccagtcc

SEQ ID NO: 3277 - RNA, 21 nt, synthetic construct
  source 1..21: mol_type = other RNA
gaagagaggagccattttggt

SEQ ID NO: 3278 - RNA, 21 nt, synthetic construct
  source 1..21: mol_type = other RNA
gaagcaactcatatattaaat

SEQ ID NO: 3279 - RNA, 21 nt, synthetic construct
  source 1..21: mol_type = other RNA
gaagcagaattaaatactgta

SEQ ID NO: 3280 - RNA, 21 nt, synthetic construct
  source 1..21: mol_type = other RNA
gaagcatcagtttaaaaattt

SEQ ID NO: 3281 - RNA, 21 nt, synthetic construct
  source 1..21: mol_type = other RNA
gaataccaaaatggctcctct

SEQ ID NO: 3282 - RNA, 21 nt, synthetic construct
  source 1..21: mol_type = other RNA
gaataccgtttacatttctca

SEQ ID NO: 3283 - RNA, 21 nt, synthetic construct
  source 1..21: mol_type = other RNA
gaatcaattttagatggtcac

SEQ ID NO: 3284 - RNA, 21 nt, synthetic construct
  source 1..21: mol_type = other RNA
gaatcacagcatatttagggg

SEQ ID NO: 3285 - RNA, 21 nt, synthetic construct
  source 1..21: mol_type = other RNA
gaatcctaagtaaatattttg

SEQ ID NO: 3286 - RNA, 21 nt, synthetic construct
  source 1..21: mol_type = other RNA
gaatcttgtcagattacagta

SEQ ID NO: 3287 - RNA, 21 nt, synthetic construct
  source 1..21: mol_type = other RNA
gaatgaacatatttgtggcat

SEQ ID NO: 3288 - RNA, 21 nt, synthetic construct
  source 1..21: mol_type = other RNA
gaatgaggttaatgtttaaat

SEQ ID NO: 3289 - RNA, 21 nt, synthetic construct
  source 1..21: mol_type = other RNA
gaatgtattagaatcacagca

SEQ ID NO: 3290 - RNA, 21 nt, synthetic construct
  source 1..21: mol_type = other RNA
gaattttgattgagaaatgta

SEQ ID NO: 3291 - RNA, 21 nt, synthetic construct
  source 1..21: mol_type = other RNA
gacaaaggtaggtcaccatat

SEQ ID NO: 3292 - RNA, 21 nt, synthetic construct
  source 1..21: mol_type = other RNA
gacaagattcctttacaatta

SEQ ID NO: 3293 - RNA, 21 nt, synthetic construct
  source 1..21: mol_type = other RNA
gacaagcatgtatatatgttt

SEQ ID NO: 3294 - RNA, 21 nt, synthetic construct
  source 1..21: mol_type = other RNA
gacaagtgatactgtggtaaa

SEQ ID NO: 3295 - RNA, 21 nt, synthetic construct
  source 1..21: mol_type = other RNA
gacaatttcaaatgcaaaata

SEQ ID NO: 3296 - RNA, 21 nt, synthetic construct
  source 1..21: mol_type = other RNA
gacagcgaacttattttaata

SEQ ID NO: 3297 - RNA, 21 nt, synthetic construct
  source 1..21: mol_type = other RNA
gacagcttagtctgtggtcct

SEQ ID NO: 3298 - RNA, 21 nt, synthetic construct
  source 1..21: mol_type = other RNA
gacagtgactttaagataaaa

SEQ ID NO: 3299 - RNA, 21 nt, synthetic construct
  source 1..21: mol_type = other RNA
gacatcacaacagatccctaa

SEQ ID NO: 3300 - RNA, 21 nt, synthetic construct
  source 1..21: mol_type = other RNA
gacatgtatattggataattt

SEQ ID NO: 3301 - RNA, 21 nt, synthetic construct
  source 1..21: mol_type = other RNA
gaccacagactaagctgtcga

SEQ ID NO: 3302 - RNA, 21 nt, synthetic construct
  source 1..21: mol_type = other RNA
gaccacattaacttggaatga

SEQ ID NO: 3303 - RNA, 21 nt, synthetic construct
  source 1..21: mol_type = other RNA
gaccatctaaaattgattccc

SEQ ID NO: 3304 - RNA, 21 nt, synthetic construct
  source 1..21: mol_type = other RNA
gacccagtccctaaattatag

SEQ ID NO: 3305 - RNA, 21 nt, synthetic construct
  source 1..21: mol_type = other RNA
gacctacctttgtcaatactt

SEQ ID NO: 3306 - RNA, 21 nt, synthetic construct
  source 1..21: mol_type = other RNA
gacgatttttagttttgaaat

SEQ ID NO: 3307 - RNA, 21 nt, synthetic construct
  source 1..21: mol_type = other RNA
gactaaatacagaggactggt

SEQ ID NO: 3308 - RNA, 21 nt, synthetic construct
  source 1..21: mol_type = other RNA
gactaagctgtcgaaattaac

SEQ ID NO: 3309 - RNA, 21 nt, synthetic construct
  source 1..21: mol_type = other RNA
gactactaagtcacattgact

SEQ ID NO: 3310 - RNA, 21 nt, synthetic construct
  source 1..21: mol_type = other RNA
gactgggtctttgtttattga

SEQ ID NO: 3311 - RNA, 21 nt, synthetic construct
  source 1..21: mol_type = other RNA
gactggtaattgtacagttct

SEQ ID NO: 3312 - RNA, 21 nt, synthetic construct
  source 1..21: mol_type = other RNA
gacttagtagtcatctccatt

SEQ ID NO: 3313 - RNA, 21 nt, synthetic construct
  source 1..21: mol_type = other RNA
gactttaacatgaggtatcac

SEQ ID NO: 3314 - RNA, 21 nt, synthetic construct
  source 1..21: mol_type = other RNA
gacttttattttaaaaggcat

SEQ ID NO: 3315 - RNA, 21 nt, synthetic construct
  source 1..21: mol_type = other RNA
gagaaagcttgagaaatagat

SEQ ID NO: 3316 - RNA, 21 nt, synthetic construct
  source 1..21: mol_type = other RNA
gagaaatgtaaacggtattct

SEQ ID NO: 3317 - RNA, 21 nt, synthetic construct
  source 1..21: mol_type = other RNA
gagacttttattttaaaaggc

SEQ ID NO: 3318 - RNA, 21 nt, synthetic construct
  source 1..21: mol_type = other RNA
gagaggagccattttggtatt

SEQ ID NO: 3319 - RNA, 21 nt, synthetic construct
  source 1..21: mol_type = other RNA
gagatgactactaagtcacat

SEQ ID NO: 3320 - RNA, 21 nt, synthetic construct
  source 1..21: mol_type = other RNA
gagccattttggtattctggc

SEQ ID NO: 3321 - RNA, 21 nt, synthetic construct
  source 1..21: mol_type = other RNA
gagctaatatcacaactttcc

SEQ ID NO: 3322 - RNA, 21 nt, synthetic construct
  source 1..21: mol_type = other RNA
gaggaagcaactcatatatta

SEQ ID NO: 3323 - RNA, 21 nt, synthetic construct
  source 1..21: mol_type = other RNA
gaggactggtaattgtacagt

SEQ ID NO: 3324 - RNA, 21 nt, synthetic construct
  source 1..21: mol_type = other RNA
gaggagccattttggtattct

SEQ ID NO: 3325 - RNA, 21 nt, synthetic construct
  source 1..21: mol_type = other RNA
gaggcaaatttaaaaggcaat

SEQ ID NO: 3326 - RNA, 21 nt, synthetic construct
  source 1..21: mol_type = other RNA
gaggtatcactataccttatt

SEQ ID NO: 3327 - RNA, 21 nt, synthetic construct
  source 1..21: mol_type = other RNA
gaggtttatttctacttgaaa

SEQ ID NO: 3328 - RNA, 21 nt, synthetic construct
  source 1..21: mol_type = other RNA
gagtaaatgtttgatatgatt

SEQ ID NO: 3329 - RNA, 21 nt, synthetic construct
  source 1..21: mol_type = other RNA
gagtactagttttttaaactg

SEQ ID NO: 3330 - RNA, 21 nt, synthetic construct
  source 1..21: mol_type = other RNA
gagtatgtgtaaaaatctgta

SEQ ID NO: 3331 - RNA, 21 nt, synthetic construct
  source 1..21: mol_type = other RNA
gagttaaagtttatatttccc

SEQ ID NO: 3332 - RNA, 21 nt, synthetic construct
  source 1..21: mol_type = other RNA
gagttttaacaagagtactag

SEQ ID NO: 3333 - RNA, 21 nt, synthetic construct
  source 1..21: mol_type = other RNA
gataaacatgcaagaataatt

SEQ ID NO: 3334 - RNA, 21 nt, synthetic construct
  source 1..21: mol_type = other RNA
gatacaaattttttaccacag

SEQ ID NO: 3335 - RNA, 21 nt, synthetic construct
  source 1..21: mol_type = other RNA
gatacctcatgttaaagtcaa

SEQ ID NO: 3336 - RNA, 21 nt, synthetic construct
  source 1..21: mol_type = other RNA
gatactgtggtaaaaaatttg

SEQ ID NO: 3337 - RNA, 21 nt, synthetic construct
  source 1..21: mol_type = other RNA
gatatagtgcccaagttatat

SEQ ID NO: 3338 - RNA, 21 nt, synthetic construct
  source 1..21: mol_type = other RNA
gatatgtatgatctatgtgaa

SEQ ID NO: 3339 - RNA, 21 nt, synthetic construct
  source 1..21: mol_type = other RNA
gatattagctcatatgatgcc

SEQ ID NO: 3340 - RNA, 21 nt, synthetic construct
  source 1..21: mol_type = other RNA
gatccctaaatccctaaatcc

SEQ ID NO: 3341 - RNA, 21 nt, synthetic construct
  source 1..21: mol_type = other RNA
gatctatgtgaatcctaagta

SEQ ID NO: 3342 - RNA, 21 nt, synthetic construct
  source 1..21: mol_type = other RNA
gatctgttgtgatgtcgataa

SEQ ID NO: 3343 - RNA, 21 nt, synthetic construct
  source 1..21: mol_type = other RNA
gatgactactaagtcacattg

SEQ ID NO: 3344 - RNA, 21 nt, synthetic construct
  source 1..21: mol_type = other RNA
gatgccacaaatatgttcatt

SEQ ID NO: 3345 - RNA, 21 nt, synthetic construct
  source 1..21: mol_type = other RNA
gatgccttttaaaataaaagt

SEQ ID NO: 3346 - RNA, 21 nt, synthetic construct
  source 1..21: mol_type = other RNA
gatgcttcattttgctacaaa

SEQ ID NO: 3347 - RNA, 21 nt, synthetic construct
  source 1..21: mol_type = other RNA
gatggtcacaatctagattat

SEQ ID NO: 3348 - RNA, 21 nt, synthetic construct
  source 1..21: mol_type = other RNA
gatgtcgataaacatgcaaga

SEQ ID NO: 3349 - RNA, 21 nt, synthetic construct
  source 1..21: mol_type = other RNA
gatgtgggaatcaattttaga

SEQ ID NO: 3350 - RNA, 21 nt, synthetic construct
  source 1..21: mol_type = other RNA
gattaaacatacaatcacata

SEQ ID NO: 3351 - RNA, 21 nt, synthetic construct
  source 1..21: mol_type = other RNA
gattacagtaagaatgaacat

SEQ ID NO: 3352 - RNA, 21 nt, synthetic construct
  source 1..21: mol_type = other RNA
gattataatcaataggtgaac

SEQ ID NO: 3353 - RNA, 21 nt, synthetic construct
  source 1..21: mol_type = other RNA
gattataatctagattgtgac

SEQ ID NO: 3354 - RNA, 21 nt, synthetic construct
  source 1..21: mol_type = other RNA
gattattagaccacattaact

SEQ ID NO: 3355 - RNA, 21 nt, synthetic construct
  source 1..21: mol_type = other RNA
gattcacatagatcatacata

SEQ ID NO: 3356 - RNA, 21 nt, synthetic construct
  source 1..21: mol_type = other RNA
gattcccacatcacaaaattt

SEQ ID NO: 3357 - RNA, 21 nt, synthetic construct
  source 1..21: mol_type = other RNA
gattcctttacaattatttgt

SEQ ID NO: 3358 - RNA, 21 nt, synthetic construct
  source 1..21: mol_type = other RNA
gattctaatacattcgtgtag

SEQ ID NO: 3359 - RNA, 21 nt, synthetic construct
  source 1..21: mol_type = other RNA
gattgagaaatgtaaacggta

SEQ ID NO: 3360 - RNA, 21 nt, synthetic construct
  source 1..21: mol_type = other RNA
gattgtgaccatctaaaattg

SEQ ID NO: 3361 - RNA, 21 nt, synthetic construct
  source 1..21: mol_type = other RNA
gatttaataccagattattag

SEQ ID NO: 3362 - RNA, 21 nt, synthetic construct
  source 1..21: mol_type = other RNA
gatttagggatctgttgtgat

SEQ ID NO: 3363 - RNA, 21 nt, synthetic construct
  source 1..21: mol_type = other RNA
gatttagggatttagggatct

SEQ ID NO: 3364 - RNA, 21 nt, synthetic construct
  source 1..21: mol_type = other RNA
gatttttacacatactctgtg

SEQ ID NO: 3365 - RNA, 21 nt, synthetic construct
  source 1..21: mol_type = other RNA
gattttttaaaactgccagta

SEQ ID NO: 3366 - RNA, 21 nt, synthetic construct
  source 1..21: mol_type = other RNA
gcaaaatgaagcatcagttta

SEQ ID NO: 3367 - RNA, 21 nt, synthetic construct
  source 1..21: mol_type = other RNA
gcaaatttaaaaggcaataat

SEQ ID NO: 3368 - RNA, 21 nt, synthetic construct
  source 1..21: mol_type = other RNA
gcaataatttaaacattaacc

SEQ ID NO: 3369 - RNA, 21 nt, synthetic construct
  source 1..21: mol_type = other RNA
gcacagagtatgtgtaaaaat

SEQ ID NO: 3370 - RNA, 21 nt, synthetic construct
  source 1..21: mol_type = other RNA
gcactatatcctttaacaaat

SEQ ID NO: 3371 - RNA, 21 nt, synthetic construct
  source 1..21: mol_type = other RNA
gcagaattaaatactgtatta

SEQ ID NO: 3372 - RNA, 21 nt, synthetic construct
  source 1..21: mol_type = other RNA
gcatatttaggggaaatataa

SEQ ID NO: 3373 - RNA, 21 nt, synthetic construct
  source 1..21: mol_type = other RNA
gcatcagtttaaaaatttgta

SEQ ID NO: 3374 - RNA, 21 nt, synthetic construct
  source 1..21: mol_type = other RNA
gcatcatatgagctaatatca

SEQ ID NO: 3375 - RNA, 21 nt, synthetic construct
  source 1..21: mol_type = other RNA
gcatcgagttaaagtttatat

SEQ ID NO: 3376 - RNA, 21 nt, synthetic construct
  source 1..21: mol_type = other RNA
gcatgtttatcgacatcacaa

SEQ ID NO: 3377 - RNA, 21 nt, synthetic construct
  source 1..21: mol_type = other RNA
gcatttgaaattgtccaattt

SEQ ID NO: 3378 - RNA, 21 nt, synthetic construct
  source 1..21: mol_type = other RNA
gccacaaatatgttcattctt

SEQ ID NO: 3379 - RNA, 21 nt, synthetic construct
  source 1..21: mol_type = other RNA
gccagaataccaaaatggctc

SEQ ID NO: 3380 - RNA, 21 nt, synthetic construct
  source 1..21: mol_type = other RNA
gccagtaagaaattttaaatt

SEQ ID NO: 3381 - RNA, 21 nt, synthetic construct
  source 1..21: mol_type = other RNA
gccattttggtattctggccc

SEQ ID NO: 3382 - RNA, 21 nt, synthetic construct
  source 1..21: mol_type = other RNA
gcccaagttatatggtgacct

SEQ ID NO: 3383 - RNA, 21 nt, synthetic construct
  source 1..21: mol_type = other RNA
gcctgacaagcatgtatatat

SEQ ID NO: 3384 - RNA, 21 nt, synthetic construct
  source 1..21: mol_type = other RNA
gccttttaaaataaaagtctc

SEQ ID NO: 3385 - RNA, 21 nt, synthetic construct
  source 1..21: mol_type = other RNA
gcgaacttattttaatacagt

SEQ ID NO: 3386 - RNA, 21 nt, synthetic construct
  source 1..21: mol_type = other RNA
gcgttaatttcgacagcttag

SEQ ID NO: 3387 - RNA, 21 nt, synthetic construct
  source 1..21: mol_type = other RNA
gctaagtattgacaaaggtag

SEQ ID NO: 3388 - RNA, 21 nt, synthetic construct
  source 1..21: mol_type = other RNA
gctaatatcacaactttccca

SEQ ID NO: 3389 - RNA, 21 nt, synthetic construct
  source 1..21: mol_type = other RNA
gctacaaaataatttggagta

SEQ ID NO: 3390 - RNA, 21 nt, synthetic construct
  source 1..21: mol_type = other RNA
gctcatatgatgccttttaaa

SEQ ID NO: 3391 - RNA, 21 nt, synthetic construct
  source 1..21: mol_type = other RNA
gctcctctcttcccccaaaat

SEQ ID NO: 3392 - RNA, 21 nt, synthetic construct
  source 1..21: mol_type = other RNA
gctgacgatttttagttttga

SEQ ID NO: 3393 - RNA, 21 nt, synthetic construct
  source 1..21: mol_type = other RNA
gctgtcgaaattaacgctgat

SEQ ID NO: 3394 - RNA, 21 nt, synthetic construct
  source 1..21: mol_type = other RNA
gctgtctttaaacaaatggag

SEQ ID NO: 3395 - RNA, 21 nt, synthetic construct
  source 1..21: mol_type = other RNA
gctgtgattctaatacattcg

SEQ ID NO: 3396 - RNA, 21 nt, synthetic construct
  source 1..21: mol_type = other RNA
gctgtttaaacgttcagtaac

SEQ ID NO: 3397 - RNA, 21 nt, synthetic construct
  source 1..21: mol_type = other RNA
gcttagtctgtggtcctgaaa

SEQ ID NO: 3398 - RNA, 21 nt, synthetic construct
  source 1..21: mol_type = other RNA
gcttcattaggtttcataaat

SEQ ID NO: 3399 - RNA, 21 nt, synthetic construct
  source 1..21: mol_type = other RNA
gcttcattttgctacaaaata

SEQ ID NO: 3400 - RNA, 21 nt, synthetic construct
  source 1..21: mol_type = other RNA
gcttgtcaggctgtttaaacg

SEQ ID NO: 3401 - RNA, 21 nt, synthetic construct
  source 1..21: mol_type = other RNA
gctttctcttaaggatttaat

SEQ ID NO: 3402 - RNA, 21 nt, synthetic construct
  source 1..21: mol_type = other RNA
ggaaaccaaatagaggaagca

SEQ ID NO: 3403 - RNA, 21 nt, synthetic construct
  source 1..21: mol_type = other RNA
ggaaagttgtgatattagctc

SEQ ID NO: 3404 - RNA, 21 nt, synthetic construct
  source 1..21: mol_type = other RNA
ggaaatataaactttaactcg

SEQ ID NO: 3405 - RNA, 21 nt, synthetic construct
  source 1..21: mol_type = other RNA
ggaacaaaatatttacttagg

SEQ ID NO: 3406 - RNA, 21 nt, synthetic construct
  source 1..21: mol_type = other RNA
ggaagagaggagccattttgg

SEQ ID NO: 3407 - RNA, 21 nt, synthetic construct
  source 1..21: mol_type = other RNA
ggaagcaactcatatattaaa

SEQ ID NO: 3408 - RNA, 21 nt, synthetic construct
  source 1..21: mol_type = other RNA
ggaatcaattttagatggtca

SEQ ID NO: 3409 - RNA, 21 nt, synthetic construct
  source 1..21: mol_type = other RNA
ggaatcttgtcagattacagt

SEQ ID NO: 3410 - RNA, 21 nt, synthetic construct
  source 1..21: mol_type = other RNA
ggaatgaggttaatgtttaaa

SEQ ID NO: 3411 - RNA, 21 nt, synthetic construct
  source 1..21: mol_type = other RNA
ggacaatttcaaatgcaaaat

SEQ ID NO: 3412 - RNA, 21 nt, synthetic construct
  source 1..21: mol_type = other RNA
ggaccacagactaagctgtcg

SEQ ID NO: 3413 - RNA, 21 nt, synthetic construct
  source 1..21: mol_type = other RNA
ggactgggtctttgtttattg

SEQ ID NO: 3414 - RNA, 21 nt, synthetic construct
  source 1..21: mol_type = other RNA
ggactggtaattgtacagttc

SEQ ID NO: 3415 - RNA, 21 nt, synthetic construct
  source 1..21: mol_type = other RNA
ggagatgactactaagtcaca

SEQ ID NO: 3416 - RNA, 21 nt, synthetic construct
  source 1..21: mol_type = other RNA
ggagccattttggtattctgg

SEQ ID NO: 3417 - RNA, 21 nt, synthetic construct
  source 1..21: mol_type = other RNA
ggagtaaatgtttgatatgat

SEQ ID NO: 3418 - RNA, 21 nt, synthetic construct
  source 1..21: mol_type = other RNA
ggatatagtgcccaagttata

SEQ ID NO: 3419 - RNA, 21 nt, synthetic construct
  source 1..21: mol_type = other RNA
ggatctgttgtgatgtcgata

SEQ ID NO: 3420 - RNA, 21 nt, synthetic construct
  source 1..21: mol_type = other RNA
ggattcacatagatcatacat

SEQ ID NO: 3421 - RNA, 21 nt, synthetic construct
  source 1..21: mol_type = other RNA
ggatttaataccagattatta

SEQ ID NO: 3422 - RNA, 21 nt, synthetic construct
  source 1..21: mol_type = other RNA
ggatttagggatctgttgtga

SEQ ID NO: 3423 - RNA, 21 nt, synthetic construct
  source 1..21: mol_type = other RNA
ggatttagggatttagggatc

SEQ ID NO: 3424 - RNA, 21 nt, synthetic construct
  source 1..21: mol_type = other RNA
ggcaaatttaaaaggcaataa

SEQ ID NO: 3425 - RNA, 21 nt, synthetic construct
  source 1..21: mol_type = other RNA
ggcaataatttaaacattaac

SEQ ID NO: 3426 - RNA, 21 nt, synthetic construct
  source 1..21: mol_type = other RNA
ggcactatatcctttaacaaa

SEQ ID NO: 3427 - RNA, 21 nt, synthetic construct
  source 1..21: mol_type = other RNA
ggcagttttaaaaaatcatat

SEQ ID NO: 3428 - RNA, 21 nt, synthetic construct
  source 1..21: mol_type = other RNA
ggcatcatatgagctaatatc

SEQ ID NO: 3429 - RNA, 21 nt, synthetic construct
  source 1..21: mol_type = other RNA
ggcatcgagttaaagtttata

SEQ ID NO: 3430 - RNA, 21 nt, synthetic construct
  source 1..21: mol_type = other RNA
ggccagaataccaaaatggct

SEQ ID NO: 3431 - RNA, 21 nt, synthetic construct
  source 1..21: mol_type = other RNA
ggctcctctcttcccccaaaa

SEQ ID NO: 3432 - RNA, 21 nt, synthetic construct
  source 1..21: mol_type = other RNA
ggctgtttaaacgttcagtaa

SEQ ID NO: 3433 - RNA, 21 nt, synthetic construct
  source 1..21: mol_type = other RNA
gggaaagttgtgatattagct

SEQ ID NO: 3434 - RNA, 21 nt, synthetic construct
  source 1..21: mol_type = other RNA
gggaaatataaactttaactc

SEQ ID NO: 3435 - RNA, 21 nt, synthetic construct
  source 1..21: mol_type = other RNA
gggaagagaggagccattttg

SEQ ID NO: 3436 - RNA, 21 nt, synthetic construct
  source 1..21: mol_type = other RNA
gggaatcaattttagatggtc

SEQ ID NO: 3437 - RNA, 21 nt, synthetic construct
  source 1..21: mol_type = other RNA
gggactgggtctttgtttatt

SEQ ID NO: 3438 - RNA, 21 nt, synthetic construct
  source 1..21: mol_type = other RNA
gggatctgttgtgatgtcgat

SEQ ID NO: 3439 - RNA, 21 nt, synthetic construct
  source 1..21: mol_type = other RNA
gggatttagggatctgttgtg

SEQ ID NO: 3440 - RNA, 21 nt, synthetic construct
  source 1..21: mol_type = other RNA
gggatttagggatttagggat

SEQ ID NO: 3441 - RNA, 21 nt, synthetic construct
  source 1..21: mol_type = other RNA
gggcactatatcctttaacaa

SEQ ID NO: 3442 - RNA, 21 nt, synthetic construct
  source 1..21: mol_type = other RNA
gggccagaataccaaaatggc

SEQ ID NO: 3443 - RNA, 21 nt, synthetic construct
  source 1..21: mol_type = other RNA
ggggaaatataaactttaact

SEQ ID NO: 3444 - RNA, 21 nt, synthetic construct
  source 1..21: mol_type = other RNA
ggggaagagaggagccatttt

SEQ ID NO: 3445 - RNA, 21 nt, synthetic construct
  source 1..21: mol_type = other RNA
gggggaagagaggagccattt

SEQ ID NO: 3446 - RNA, 21 nt, synthetic construct
  source 1..21: mol_type = other RNA
gggtctttgtttattgaattt

SEQ ID NO: 3447 - RNA, 21 nt, synthetic construct
  source 1..21: mol_type = other RNA
ggtaattgtacagttcttaaa

SEQ ID NO: 3448 - RNA, 21 nt, synthetic construct
  source 1..21: mol_type = other RNA
ggtaggtcaccatataacttg

SEQ ID NO: 3449 - RNA, 21 nt, synthetic construct
  source 1..21: mol_type = other RNA
ggtatagtgatacctcatgtt

SEQ ID NO: 3450 - RNA, 21 nt, synthetic construct
  source 1..21: mol_type = other RNA
ggtatcactataccttatttg

SEQ ID NO: 3451 - RNA, 21 nt, synthetic construct
  source 1..21: mol_type = other RNA
ggtattaaatccttaagagaa

SEQ ID NO: 3452 - RNA, 21 nt, synthetic construct
  source 1..21: mol_type = other RNA
ggtattctttaaggttatgtg

SEQ ID NO: 3453 - RNA, 21 nt, synthetic construct
  source 1..21: mol_type = other RNA
ggtcacaatctagattataat

SEQ ID NO: 3454 - RNA, 21 nt, synthetic construct
  source 1..21: mol_type = other RNA
ggtcaccatataacttgggca

SEQ ID NO: 3455 - RNA, 21 nt, synthetic construct
  source 1..21: mol_type = other RNA
ggtcctgaaaattatagatta

SEQ ID NO: 3456 - RNA, 21 nt, synthetic construct
  source 1..21: mol_type = other RNA
ggtctaataatctggtattaa

SEQ ID NO: 3457 - RNA, 21 nt, synthetic construct
  source 1..21: mol_type = other RNA
ggtctttgtttattgaatttt

SEQ ID NO: 3458 - RNA, 21 nt, synthetic construct
  source 1..21: mol_type = other RNA
ggtgaacttattaaataactt

SEQ ID NO: 3459 - RNA, 21 nt, synthetic construct
  source 1..21: mol_type = other RNA
ggtgacctacctttgtcaata

SEQ ID NO: 3460 - RNA, 21 nt, synthetic construct
  source 1..21: mol_type = other RNA
ggttaatgtttaaattattgc

SEQ ID NO: 3461 - RNA, 21 nt, synthetic construct
  source 1..21: mol_type = other RNA
ggttatgtgattgtatgttta

SEQ ID NO: 3462 - RNA, 21 nt, synthetic construct
  source 1..21: mol_type = other RNA
ggtttatttctacttgaaaac

SEQ ID NO: 3463 - RNA, 21 nt, synthetic construct
  source 1..21: mol_type = other RNA
ggttttcaagtagaaataaac

SEQ ID NO: 3464 - RNA, 21 nt, synthetic construct
  source 1..21: mol_type = other RNA
gtaaacggtattctttaaggt

SEQ ID NO: 3465 - RNA, 21 nt, synthetic construct
  source 1..21: mol_type = other RNA
gtaaaggaatcttgtcagatt

SEQ ID NO: 3466 - RNA, 21 nt, synthetic construct
  source 1..21: mol_type = other RNA
gtaaatattttgttccagaaa

SEQ ID NO: 3467 - RNA, 21 nt, synthetic construct
  source 1..21: mol_type = other RNA
gtaacaagttactgaacgttt

SEQ ID NO: 3468 - RNA, 21 nt, synthetic construct
  source 1..21: mol_type = other RNA
gtaacttgttacgaggtttat

SEQ ID NO: 3469 - RNA, 21 nt, synthetic construct
  source 1..21: mol_type = other RNA
gtaagaatgaacatatttgtg

SEQ ID NO: 3470 - RNA, 21 nt, synthetic construct
  source 1..21: mol_type = other RNA
gtaatctgacaagattccttt

SEQ ID NO: 3471 - RNA, 21 nt, synthetic construct
  source 1..21: mol_type = other RNA
gtaattgtacagttcttaaat

SEQ ID NO: 3472 - RNA, 21 nt, synthetic construct
  source 1..21: mol_type = other RNA
gtacaattaccagtcctctgt

SEQ ID NO: 3473 - RNA, 21 nt, synthetic construct
  source 1..21: mol_type = other RNA
gtacagttcttaaatgttgta

SEQ ID NO: 3474 - RNA, 21 nt, synthetic construct
  source 1..21: mol_type = other RNA
gtactagttttttaaactggg

SEQ ID NO: 3475 - RNA, 21 nt, synthetic construct
  source 1..21: mol_type = other RNA
gtactcttgttaaaactctaa

SEQ ID NO: 3476 - RNA, 21 nt, synthetic construct
  source 1..21: mol_type = other RNA
gtacttttctggaacaaaata

SEQ ID NO: 3477 - RNA, 21 nt, synthetic construct
  source 1..21: mol_type = other RNA
gtagaaataaacctcgtaaca

SEQ ID NO: 3478 - RNA, 21 nt, synthetic construct
  source 1..21: mol_type = other RNA
gtagcaaaatgaagcatcagt

SEQ ID NO: 3479 - RNA, 21 nt, synthetic construct
  source 1..21: mol_type = other RNA
gtaggtcaccatataacttgg

SEQ ID NO: 3480 - RNA, 21 nt, synthetic construct
  source 1..21: mol_type = other RNA
gtaggttttcaagtagaaata

SEQ ID NO: 3481 - RNA, 21 nt, synthetic construct
  source 1..21: mol_type = other RNA
gtagtcatctccatttgttta

SEQ ID NO: 3482 - RNA, 21 nt, synthetic construct
  source 1..21: mol_type = other RNA
gtatagtgatacctcatgtta

SEQ ID NO: 3483 - RNA, 21 nt, synthetic construct
  source 1..21: mol_type = other RNA
gtatcactataccttatttgt

SEQ ID NO: 3484 - RNA, 21 nt, synthetic construct
  source 1..21: mol_type = other RNA
gtatcacttgtcagaatttat

SEQ ID NO: 3485 - RNA, 21 nt, synthetic construct
  source 1..21: mol_type = other RNA
gtatctaatctttagggattt

SEQ ID NO: 3486 - RNA, 21 nt, synthetic construct
  source 1..21: mol_type = other RNA
gtatgatctatgtgaatccta

SEQ ID NO: 3487 - RNA, 21 nt, synthetic construct
  source 1..21: mol_type = other RNA
gtatgtgtaaaaatctgtaat

SEQ ID NO: 3488 - RNA, 21 nt, synthetic construct
  source 1..21: mol_type = other RNA
gtattaaaataagttcgctgt

SEQ ID NO: 3489 - RNA, 21 nt, synthetic construct
  source 1..21: mol_type = other RNA
gtattaaatccttaagagaaa

SEQ ID NO: 3490 - RNA, 21 nt, synthetic construct
  source 1..21: mol_type = other RNA
gtattacagatttttacacat

SEQ ID NO: 3491 - RNA, 21 nt, synthetic construct
  source 1..21: mol_type = other RNA
gtattagaatcacagcatatt

SEQ ID NO: 3492 - RNA, 21 nt, synthetic construct
  source 1..21: mol_type = other RNA
gtattctttaaggttatgtga

SEQ ID NO: 3493 - RNA, 21 nt, synthetic construct
  source 1..21: mol_type = other RNA
gtattgacaaaggtaggtcac

SEQ ID NO: 3494 - RNA, 21 nt, synthetic construct
  source 1..21: mol_type = other RNA
gtatttaattctgcttcatta

SEQ ID NO: 3495 - RNA, 21 nt, synthetic construct
  source 1..21: mol_type = other RNA
gtatttagtcaagtttagagt

SEQ ID NO: 3496 - RNA, 21 nt, synthetic construct
  source 1..21: mol_type = other RNA
gtcaagtttagagttttaaca

SEQ ID NO: 3497 - RNA, 21 nt, synthetic construct
  source 1..21: mol_type = other RNA
gtcaatacttagcattatgta

SEQ ID NO: 3498 - RNA, 21 nt, synthetic construct
  source 1..21: mol_type = other RNA
gtcaatgtgacttagtagtca

SEQ ID NO: 3499 - RNA, 21 nt, synthetic construct
  source 1..21: mol_type = other RNA
gtcacaatctagattataatc

SEQ ID NO: 3500 - RNA, 21 nt, synthetic construct
  source 1..21: mol_type = other RNA
gtcacatatataaaagatatg

SEQ ID NO: 3501 - RNA, 21 nt, synthetic construct
  source 1..21: mol_type = other RNA
gtcacattgactttaacatga

SEQ ID NO: 3502 - RNA, 21 nt, synthetic construct
  source 1..21: mol_type = other RNA
gtcaccatataacttgggcac

SEQ ID NO: 3503 - RNA, 21 nt, synthetic construct
  source 1..21: mol_type = other RNA
gtcactgtctatttaagatta

SEQ ID NO: 3504 - RNA, 21 nt, synthetic construct
  source 1..21: mol_type = other RNA
gtcagattacagtaagaatga

SEQ ID NO: 3505 - RNA, 21 nt, synthetic construct
  source 1..21: mol_type = other RNA
gtcagcacagagtatgtgtaa

SEQ ID NO: 3506 - RNA, 21 nt, synthetic construct
  source 1..21: mol_type = other RNA
gtcaggctgtttaaacgttca

SEQ ID NO: 3507 - RNA, 21 nt, synthetic construct
  source 1..21: mol_type = other RNA
gtcatctccatttgtttaaag

SEQ ID NO: 3508 - RNA, 21 nt, synthetic construct
  source 1..21: mol_type = other RNA
gtccaattttgggggaagaga

SEQ ID NO: 3509 - RNA, 21 nt, synthetic construct
  source 1..21: mol_type = other RNA
gtccctaaattatagaaattt

SEQ ID NO: 3510 - RNA, 21 nt, synthetic construct
  source 1..21: mol_type = other RNA
gtcctctgtatttagtcaagt

SEQ ID NO: 3511 - RNA, 21 nt, synthetic construct
  source 1..21: mol_type = other RNA
gtcctgaaaattatagattat

SEQ ID NO: 3512 - RNA, 21 nt, synthetic construct
  source 1..21: mol_type = other RNA
gtcgaaattaacgctgatttt

SEQ ID NO: 3513 - RNA, 21 nt, synthetic construct
  source 1..21: mol_type = other RNA
gtcgataaacatgcaagaata

SEQ ID NO: 3514 - RNA, 21 nt, synthetic construct
  source 1..21: mol_type = other RNA
gtctaataatctggtattaaa

SEQ ID NO: 3515 - RNA, 21 nt, synthetic construct
  source 1..21: mol_type = other RNA
gtctgtggtcctgaaaattat

SEQ ID NO: 3516 - RNA, 21 nt, synthetic construct
  source 1..21: mol_type = other RNA
gtctttaaacaaatggagatg

SEQ ID NO: 3517 - RNA, 21 nt, synthetic construct
  source 1..21: mol_type = other RNA
gtgaatcctaagtaaatattt

SEQ ID NO: 3518 - RNA, 21 nt, synthetic construct
  source 1..21: mol_type = other RNA
gtgaccatctaaaattgattc

SEQ ID NO: 3519 - RNA, 21 nt, synthetic construct
  source 1..21: mol_type = other RNA
gtgacctacctttgtcaatac

SEQ ID NO: 3520 - RNA, 21 nt, synthetic construct
  source 1..21: mol_type = other RNA
gtgacttagtagtcatctcca

SEQ ID NO: 3521 - RNA, 21 nt, synthetic construct
  source 1..21: mol_type = other RNA
gtgatacctcatgttaaagtc

SEQ ID NO: 3522 - RNA, 21 nt, synthetic construct
  source 1..21: mol_type = other RNA
gtgatactgtggtaaaaaatt

SEQ ID NO: 3523 - RNA, 21 nt, synthetic construct
  source 1..21: mol_type = other RNA
gtgatattagctcatatgatg

SEQ ID NO: 3524 - RNA, 21 nt, synthetic construct
  source 1..21: mol_type = other RNA
gtgatgtcgataaacatgcaa

SEQ ID NO: 3525 - RNA, 21 nt, synthetic construct
  source 1..21: mol_type = other RNA
gtgatgtgggaatcaatttta

SEQ ID NO: 3526 - RNA, 21 nt, synthetic construct
  source 1..21: mol_type = other RNA
gtgattctaatacattcgtgt

SEQ ID NO: 3527 - RNA, 21 nt, synthetic construct
  source 1..21: mol_type = other RNA
gtgattgtatgtttaatctta

SEQ ID NO: 3528 - RNA, 21 nt, synthetic construct
  source 1..21: mol_type = other RNA
gtgcccaagttatatggtgac

SEQ ID NO: 3529 - RNA, 21 nt, synthetic construct
  source 1..21: mol_type = other RNA
gtgctgacgatttttagtttt

SEQ ID NO: 3530 - RNA, 21 nt, synthetic construct
  source 1..21: mol_type = other RNA
gtggcatcgagttaaagttta

SEQ ID NO: 3531 - RNA, 21 nt, synthetic construct
  source 1..21: mol_type = other RNA
gtgggaatcaattttagatgg

SEQ ID NO: 3532 - RNA, 21 nt, synthetic construct
  source 1..21: mol_type = other RNA
gtggtaaaaaatttgtatcta

SEQ ID NO: 3533 - RNA, 21 nt, synthetic construct
  source 1..21: mol_type = other RNA
gtggtcctgaaaattatagat

SEQ ID NO: 3534 - RNA, 21 nt, synthetic construct
  source 1..21: mol_type = other RNA
gtggtctaataatctggtatt

SEQ ID NO: 3535 - RNA, 21 nt, synthetic construct
  source 1..21: mol_type = other RNA
gtgtaaaaatctgtaatacaa

SEQ ID NO: 3536 - RNA, 21 nt, synthetic construct
  source 1..21: mol_type = other RNA
gtgtaggttttcaagtagaaa

SEQ ID NO: 3537 - RNA, 21 nt, synthetic construct
  source 1..21: mol_type = other RNA
gttaaaactctaaacttgact

SEQ ID NO: 3538 - RNA, 21 nt, synthetic construct
  source 1..21: mol_type = other RNA
gttaaaggatatagtgcccaa

SEQ ID NO: 3539 - RNA, 21 nt, synthetic construct
  source 1..21: mol_type = other RNA
gttaaagtcaatgtgacttag

SEQ ID NO: 3540 - RNA, 21 nt, synthetic construct
  source 1..21: mol_type = other RNA
gttaaagtttatatttcccct

SEQ ID NO: 3541 - RNA, 21 nt, synthetic construct
  source 1..21: mol_type = other RNA
gttaatgtggtctaataatct

SEQ ID NO: 3542 - RNA, 21 nt, synthetic construct
  source 1..21: mol_type = other RNA
gttaatgtttaaattattgcc

SEQ ID NO: 3543 - RNA, 21 nt, synthetic construct
  source 1..21: mol_type = other RNA
gttaatttcgacagcttagtc

SEQ ID NO: 3544 - RNA, 21 nt, synthetic construct
  source 1..21: mol_type = other RNA
gttacgaggtttatttctact

SEQ ID NO: 3545 - RNA, 21 nt, synthetic construct
  source 1..21: mol_type = other RNA
gttactgaacgtttaaacagc

SEQ ID NO: 3546 - RNA, 21 nt, synthetic construct
  source 1..21: mol_type = other RNA
gttatatggtgacctaccttt

SEQ ID NO: 3547 - RNA, 21 nt, synthetic construct
  source 1..21: mol_type = other RNA
gttatgtgattgtatgtttaa

SEQ ID NO: 3548 - RNA, 21 nt, synthetic construct
  source 1..21: mol_type = other RNA
gttatttaataagttcaccta

SEQ ID NO: 3549 - RNA, 21 nt, synthetic construct
  source 1..21: mol_type = other RNA
gttcacctattgattataatc

SEQ ID NO: 3550 - RNA, 21 nt, synthetic construct
  source 1..21: mol_type = other RNA
gttcagtaacttgttacgagg

SEQ ID NO: 3551 - RNA, 21 nt, synthetic construct
  source 1..21: mol_type = other RNA
gttcattcttactgtaatctg

SEQ ID NO: 3552 - RNA, 21 nt, synthetic construct
  source 1..21: mol_type = other RNA
gttccagaaaagtacaaaata

SEQ ID NO: 3553 - RNA, 21 nt, synthetic construct
  source 1..21: mol_type = other RNA
gttcgctgtctttaaacaaat

SEQ ID NO: 3554 - RNA, 21 nt, synthetic construct
  source 1..21: mol_type = other RNA
gttcttaaatgttgtagtatt

SEQ ID NO: 3555 - RNA, 21 nt, synthetic construct
  source 1..21: mol_type = other RNA
gttgtgatattagctcatatg

SEQ ID NO: 3556 - RNA, 21 nt, synthetic construct
  source 1..21: mol_type = other RNA
gttgtgatgtcgataaacatg

SEQ ID NO: 3557 - RNA, 21 nt, synthetic construct
  source 1..21: mol_type = other RNA
gtttaaaaaactagtactctt

SEQ ID NO: 3558 - RNA, 21 nt, synthetic construct
  source 1..21: mol_type = other RNA
gtttaaacagcctgacaagca

SEQ ID NO: 3559 - RNA, 21 nt, synthetic construct
  source 1..21: mol_type = other RNA
gtttaaacgttcagtaacttg

SEQ ID NO: 3560 - RNA, 21 nt, synthetic construct
  source 1..21: mol_type = other RNA
gtttaaagacagcgaacttat

SEQ ID NO: 3561 - RNA, 21 nt, synthetic construct
  source 1..21: mol_type = other RNA
gtttaatcttaaatagacagt

SEQ ID NO: 3562 - RNA, 21 nt, synthetic construct
  source 1..21: mol_type = other RNA
gtttacatttctcaatcaaaa

SEQ ID NO: 3563 - RNA, 21 nt, synthetic construct
  source 1..21: mol_type = other RNA
gtttagagttttaacaagagt

SEQ ID NO: 3564 - RNA, 21 nt, synthetic construct
  source 1..21: mol_type = other RNA
gtttatatttcccctaaatat

SEQ ID NO: 3565 - RNA, 21 nt, synthetic construct
  source 1..21: mol_type = other RNA
gtttatcgacatcacaacaga

SEQ ID NO: 3566 - RNA, 21 nt, synthetic construct
  source 1..21: mol_type = other RNA
gtttatttctacttgaaaacc

SEQ ID NO: 3567 - RNA, 21 nt, synthetic construct
  source 1..21: mol_type = other RNA
gttttaaattttgtgatgtgg

SEQ ID NO: 3568 - RNA, 21 nt, synthetic construct
  source 1..21: mol_type = other RNA
gttttaacaagagtactagtt

SEQ ID NO: 3569 - RNA, 21 nt, synthetic construct
  source 1..21: mol_type = other RNA
gttttcaagtagaaataaacc

SEQ ID NO: 3570 - RNA, 21 nt, synthetic construct
  source 1..21: mol_type = other RNA
gttttcatagtattaagtgtt

SEQ ID NO: 3571 - RNA, 21 nt, synthetic construct
  source 1..21: mol_type = other RNA
gttttttaaactgggaaagtt

SEQ ID NO: 3572 - RNA, 21 nt, synthetic construct
  source 1..21: mol_type = other RNA
taaaaaactagtactcttgtt

SEQ ID NO: 3573 - RNA, 21 nt, synthetic construct
  source 1..21: mol_type = other RNA
taaaaatcgtcagcacagagt

SEQ ID NO: 3574 - RNA, 21 nt, synthetic construct
  source 1..21: mol_type = other RNA
taaaactctaaacttgactaa

SEQ ID NO: 3575 - RNA, 21 nt, synthetic construct
  source 1..21: mol_type = other RNA
taaaactgccagtaagaaatt

SEQ ID NO: 3576 - RNA, 21 nt, synthetic construct
  source 1..21: mol_type = other RNA
taaaaggcatcatatgagcta

SEQ ID NO: 3577 - RNA, 21 nt, synthetic construct
  source 1..21: mol_type = other RNA
taaaataagttcgctgtcttt

SEQ ID NO: 3578 - RNA, 21 nt, synthetic construct
  source 1..21: mol_type = other RNA
taaaattgattcccacatcac

SEQ ID NO: 3579 - RNA, 21 nt, synthetic construct
  source 1..21: mol_type = other RNA
taaaatttcttactggcagtt

SEQ ID NO: 3580 - RNA, 21 nt, synthetic construct
  source 1..21: mol_type = other RNA
taaacaaagacccagtcccta

SEQ ID NO: 3581 - RNA, 21 nt, synthetic construct
  source 1..21: mol_type = other RNA
taaacaaatggagatgactac

SEQ ID NO: 3582 - RNA, 21 nt, synthetic construct
  source 1..21: mol_type = other RNA
taaacagcctgacaagcatgt

SEQ ID NO: 3583 - RNA, 21 nt, synthetic construct
  source 1..21: mol_type = other RNA
taaacatacaatcacataacc

SEQ ID NO: 3584 - RNA, 21 nt, synthetic construct
  source 1..21: mol_type = other RNA
taaacatatatacatgcttgt

SEQ ID NO: 3585 - RNA, 21 nt, synthetic construct
  source 1..21: mol_type = other RNA
taaacattaacctcattccaa

SEQ ID NO: 3586 - RNA, 21 nt, synthetic construct
  source 1..21: mol_type = other RNA
taaacccatttgttaaaggat

SEQ ID NO: 3587 - RNA, 21 nt, synthetic construct
  source 1..21: mol_type = other RNA
taaacctcgtaacaagttact

SEQ ID NO: 3588 - RNA, 21 nt, synthetic construct
  source 1..21: mol_type = other RNA
taaacggtattctttaaggtt

SEQ ID NO: 3589 - RNA, 21 nt, synthetic construct
  source 1..21: mol_type = other RNA
taaacgttcagtaacttgtta

SEQ ID NO: 3590 - RNA, 21 nt, synthetic construct
  source 1..21: mol_type = other RNA
taaactgatgcttcattttgc

SEQ ID NO: 3591 - RNA, 21 nt, synthetic construct
  source 1..21: mol_type = other RNA
taaactgggaaagttgtgata

SEQ ID NO: 3592 - RNA, 21 nt, synthetic construct
  source 1..21: mol_type = other RNA
taaacttgactaaatacagag

SEQ ID NO: 3593 - RNA, 21 nt, synthetic construct
  source 1..21: mol_type = other RNA
taaactttaactcgatgccac

SEQ ID NO: 3594 - RNA, 21 nt, synthetic construct
  source 1..21: mol_type = other RNA
taaagaataccgtttacattt

SEQ ID NO: 3595 - RNA, 21 nt, synthetic construct
  source 1..21: mol_type = other RNA
taaagacagcgaacttatttt

SEQ ID NO: 3596 - RNA, 21 nt, synthetic construct
  source 1..21: mol_type = other RNA
taaaggaatcttgtcagatta

SEQ ID NO: 3597 - RNA, 21 nt, synthetic construct
  source 1..21: mol_type = other RNA
taaaggatatagtgcccaagt

SEQ ID NO: 3598 - RNA, 21 nt, synthetic construct
  source 1..21: mol_type = other RNA
taaagtcaatgtgacttagta

SEQ ID NO: 3599 - RNA, 21 nt, synthetic construct
  source 1..21: mol_type = other RNA
taaagtcactgtctatttaag

SEQ ID NO: 3600 - RNA, 21 nt, synthetic construct
  source 1..21: mol_type = other RNA
taaagtttatatttcccctaa

SEQ ID NO: 3601 - RNA, 21 nt, synthetic construct
  source 1..21: mol_type = other RNA
taaatacagaggactggtaat

SEQ ID NO: 3602 - RNA, 21 nt, synthetic construct
  source 1..21: mol_type = other RNA
taaatagacagtgactttaag

SEQ ID NO: 3603 - RNA, 21 nt, synthetic construct
  source 1..21: mol_type = other RNA
taaatatgctgtgattctaat

SEQ ID NO: 3604 - RNA, 21 nt, synthetic construct
  source 1..21: mol_type = other RNA
taaatccctaaagattagata

SEQ ID NO: 3605 - RNA, 21 nt, synthetic construct
  source 1..21: mol_type = other RNA
taaatccctaaatccctaaag

SEQ ID NO: 3606 - RNA, 21 nt, synthetic construct
  source 1..21: mol_type = other RNA
taaatccttaagagaaagctt

SEQ ID NO: 3607 - RNA, 21 nt, synthetic construct
  source 1..21: mol_type = other RNA
taaattctgacaagtgatact

SEQ ID NO: 3608 - RNA, 21 nt, synthetic construct
  source 1..21: mol_type = other RNA
taaattttgtgatgtgggaat

SEQ ID NO: 3609 - RNA, 21 nt, synthetic construct
  source 1..21: mol_type = other RNA
taacaaataaggtatagtgat

SEQ ID NO: 3610 - RNA, 21 nt, synthetic construct
  source 1..21: mol_type = other RNA
taacaagagtactagtttttt

SEQ ID NO: 3611 - RNA, 21 nt, synthetic construct
  source 1..21: mol_type = other RNA
taacaagttactgaacgttta

SEQ ID NO: 3612 - RNA, 21 nt, synthetic construct
  source 1..21: mol_type = other RNA
taacatgaggtatcactatac

SEQ ID NO: 3613 - RNA, 21 nt, synthetic construct
  source 1..21: mol_type = other RNA
taacctcattccaagttaatg

SEQ ID NO: 3614 - RNA, 21 nt, synthetic construct
  source 1..21: mol_type = other RNA
taaccttaaagaataccgttt

SEQ ID NO: 3615 - RNA, 21 nt, synthetic construct
  source 1..21: mol_type = other RNA
taactcgatgccacaaatatg

SEQ ID NO: 3616 - RNA, 21 nt, synthetic construct
  source 1..21: mol_type = other RNA
taacttggaatgaggttaatg

SEQ ID NO: 3617 - RNA, 21 nt, synthetic construct
  source 1..21: mol_type = other RNA
taacttgggcactatatcctt

SEQ ID NO: 3618 - RNA, 21 nt, synthetic construct
  source 1..21: mol_type = other RNA
taacttgttacgaggtttatt

SEQ ID NO: 3619 - RNA, 21 nt, synthetic construct
  source 1..21: mol_type = other RNA
taagaactgtacaattaccag

SEQ ID NO: 3620 - RNA, 21 nt, synthetic construct
  source 1..21: mol_type = other RNA
taagaatgaacatatttgtgg

SEQ ID NO: 3621 - RNA, 21 nt, synthetic construct
  source 1..21: mol_type = other RNA
taagagaaagcttgagaaata

SEQ ID NO: 3622 - RNA, 21 nt, synthetic construct
  source 1..21: mol_type = other RNA
taagattaaacatacaatcac

SEQ ID NO: 3623 - RNA, 21 nt, synthetic construct
  source 1..21: mol_type = other RNA
taagctgtcgaaattaacgct

SEQ ID NO: 3624 - RNA, 21 nt, synthetic construct
  source 1..21: mol_type = other RNA
taaggatttaataccagatta

SEQ ID NO: 3625 - RNA, 21 nt, synthetic construct
  source 1..21: mol_type = other RNA
taaggtatagtgatacctcat

SEQ ID NO: 3626 - RNA, 21 nt, synthetic construct
  source 1..21: mol_type = other RNA
taaggttatgtgattgtatgt

SEQ ID NO: 3627 - RNA, 21 nt, synthetic construct
  source 1..21: mol_type = other RNA
taagtaaatattttgttccag

SEQ ID NO: 3628 - RNA, 21 nt, synthetic construct
  source 1..21: mol_type = other RNA
taagtattgacaaaggtaggt

SEQ ID NO: 3629 - RNA, 21 nt, synthetic construct
  source 1..21: mol_type = other RNA
taagtcacattgactttaaca

SEQ ID NO: 3630 - RNA, 21 nt, synthetic construct
  source 1..21: mol_type = other RNA
taagttcacctattgattata

SEQ ID NO: 3631 - RNA, 21 nt, synthetic construct
  source 1..21: mol_type = other RNA
taagttcgctgtctttaaaca

SEQ ID NO: 3632 - RNA, 21 nt, synthetic construct
  source 1..21: mol_type = other RNA
taataagttcacctattgatt

SEQ ID NO: 3633 - RNA, 21 nt, synthetic construct
  source 1..21: mol_type = other RNA
taataatctggtattaaatcc

SEQ ID NO: 3634 - RNA, 21 nt, synthetic construct
  source 1..21: mol_type = other RNA
taatacagtatttaattctgc

SEQ ID NO: 3635 - RNA, 21 nt, synthetic construct
  source 1..21: mol_type = other RNA
taatacattcgtgtaggtttt

SEQ ID NO: 3636 - RNA, 21 nt, synthetic construct
  source 1..21: mol_type = other RNA
taataccagattattagacca

SEQ ID NO: 3637 - RNA, 21 nt, synthetic construct
  source 1..21: mol_type = other RNA
taatatatgagttgcttcctc

SEQ ID NO: 3638 - RNA, 21 nt, synthetic construct
  source 1..21: mol_type = other RNA
taatatcacaactttcccagt

SEQ ID NO: 3639 - RNA, 21 nt, synthetic construct
  source 1..21: mol_type = other RNA
taatcaataggtgaacttatt

SEQ ID NO: 3640 - RNA, 21 nt, synthetic construct
  source 1..21: mol_type = other RNA
taatctagattgtgaccatct

SEQ ID NO: 3641 - RNA, 21 nt, synthetic construct
  source 1..21: mol_type = other RNA
taatctataattttcaggacc

SEQ ID NO: 3642 - RNA, 21 nt, synthetic construct
  source 1..21: mol_type = other RNA
taatctgacaagattccttta

SEQ ID NO: 3643 - RNA, 21 nt, synthetic construct
  source 1..21: mol_type = other RNA
taatctggtattaaatcctta

SEQ ID NO: 3644 - RNA, 21 nt, synthetic construct
  source 1..21: mol_type = other RNA
taatcttaaatagacagtgac

SEQ ID NO: 3645 - RNA, 21 nt, synthetic construct
  source 1..21: mol_type = other RNA
taatctttagggatttaggga

SEQ ID NO: 3646 - RNA, 21 nt, synthetic construct
  source 1..21: mol_type = other RNA
taatgaagcagaattaaatac

SEQ ID NO: 3647 - RNA, 21 nt, synthetic construct
  source 1..21: mol_type = other RNA
taatgctaagtattgacaaag

SEQ ID NO: 3648 - RNA, 21 nt, synthetic construct
  source 1..21: mol_type = other RNA
taatgtggtctaataatctgg

SEQ ID NO: 3649 - RNA, 21 nt, synthetic construct
  source 1..21: mol_type = other RNA
taattctgcttcattaggttt

SEQ ID NO: 3650 - RNA, 21 nt, synthetic construct
  source 1..21: mol_type = other RNA
taattgtaaaggaatcttgtc

SEQ ID NO: 3651 - RNA, 21 nt, synthetic construct
  source 1..21: mol_type = other RNA
taattgtacagttcttaaatg

SEQ ID NO: 3652 - RNA, 21 nt, synthetic construct
  source 1..21: mol_type = other RNA
taatttagggactgggtcttt

SEQ ID NO: 3653 - RNA, 21 nt, synthetic construct
  source 1..21: mol_type = other RNA
taatttcgacagcttagtctg

SEQ ID NO: 3654 - RNA, 21 nt, synthetic construct
  source 1..21: mol_type = other RNA
taatttggagtaaatgtttga

SEQ ID NO: 3655 - RNA, 21 nt, synthetic construct
  source 1..21: mol_type = other RNA
taattttcaggaccacagact

SEQ ID NO: 3656 - RNA, 21 nt, synthetic construct
  source 1..21: mol_type = other RNA
tacaaatttttaaactgatgc

SEQ ID NO: 3657 - RNA, 21 nt, synthetic construct
  source 1..21: mol_type = other RNA
tacaaattttttaccacagta

SEQ ID NO: 3658 - RNA, 21 nt, synthetic construct
  source 1..21: mol_type = other RNA
tacaacatttaagaactgtac

SEQ ID NO: 3659 - RNA, 21 nt, synthetic construct
  source 1..21: mol_type = other RNA
tacaatcacataaccttaaag

SEQ ID NO: 3660 - RNA, 21 nt, synthetic construct
  source 1..21: mol_type = other RNA
tacaattaccagtcctctgta

SEQ ID NO: 3661 - RNA, 21 nt, synthetic construct
  source 1..21: mol_type = other RNA
tacacatactctgtgctgacg

SEQ ID NO: 3662 - RNA, 21 nt, synthetic construct
  source 1..21: mol_type = other RNA
tacacgaatgtattagaatca

SEQ ID NO: 3663 - RNA, 21 nt, synthetic construct
  source 1..21: mol_type = other RNA
tacagaggactggtaattgta

SEQ ID NO: 3664 - RNA, 21 nt, synthetic construct
  source 1..21: mol_type = other RNA
tacagatttttacacatactc

SEQ ID NO: 3665 - RNA, 21 nt, synthetic construct
  source 1..21: mol_type = other RNA
tacagtaagaatgaacatatt

SEQ ID NO: 3666 - RNA, 21 nt, synthetic construct
  source 1..21: mol_type = other RNA
tacagtatttaattctgcttc

SEQ ID NO: 3667 - RNA, 21 nt, synthetic construct
  source 1..21: mol_type = other RNA
tacagttcttaaatgttgtag

SEQ ID NO: 3668 - RNA, 21 nt, synthetic construct
  source 1..21: mol_type = other RNA
tacataatgctaagtattgac

SEQ ID NO: 3669 - RNA, 21 nt, synthetic construct
  source 1..21: mol_type = other RNA
tacatgcttgtcaggctgttt

SEQ ID NO: 3670 - RNA, 21 nt, synthetic construct
  source 1..21: mol_type = other RNA
tacattcgtgtaggttttcaa

SEQ ID NO: 3671 - RNA, 21 nt, synthetic construct
  source 1..21: mol_type = other RNA
tacatttctcaatcaaaattc

SEQ ID NO: 3672 - RNA, 21 nt, synthetic construct
  source 1..21: mol_type = other RNA
taccaaaatggctcctctctt

SEQ ID NO: 3673 - RNA, 21 nt, synthetic construct
  source 1..21: mol_type = other RNA
taccacagtatcacttgtcag

SEQ ID NO: 3674 - RNA, 21 nt, synthetic construct
  source 1..21: mol_type = other RNA
taccagattattagaccacat

SEQ ID NO: 3675 - RNA, 21 nt, synthetic construct
  source 1..21: mol_type = other RNA
taccagtcctctgtatttagt

SEQ ID NO: 3676 - RNA, 21 nt, synthetic construct
  source 1..21: mol_type = other RNA
taccgtttacatttctcaatc

SEQ ID NO: 3677 - RNA, 21 nt, synthetic construct
  source 1..21: mol_type = other RNA
tacctcatgttaaagtcaatg

SEQ ID NO: 3678 - RNA, 21 nt, synthetic construct
  source 1..21: mol_type = other RNA
tacctttgtcaatacttagca

SEQ ID NO: 3679 - RNA, 21 nt, synthetic construct
  source 1..21: mol_type = other RNA
tacgaggtttatttctacttg

SEQ ID NO: 3680 - RNA, 21 nt, synthetic construct
  source 1..21: mol_type = other RNA
tactaagtcacattgacttta

SEQ ID NO: 3681 - RNA, 21 nt, synthetic construct
  source 1..21: mol_type = other RNA
tactacaacatttaagaactg

SEQ ID NO: 3682 - RNA, 21 nt, synthetic construct
  source 1..21: mol_type = other RNA
tactagttttttaaactggga

SEQ ID NO: 3683 - RNA, 21 nt, synthetic construct
  source 1..21: mol_type = other RNA
tactccaaattattttgtagc

SEQ ID NO: 3684 - RNA, 21 nt, synthetic construct
  source 1..21: mol_type = other RNA
tactctgtgctgacgattttt

SEQ ID NO: 3685 - RNA, 21 nt, synthetic construct
  source 1..21: mol_type = other RNA
tactcttgttaaaactctaaa

SEQ ID NO: 3686 - RNA, 21 nt, synthetic construct
  source 1..21: mol_type = other RNA
tactgaacgtttaaacagcct

SEQ ID NO: 3687 - RNA, 21 nt, synthetic construct
  source 1..21: mol_type = other RNA
tactggcagttttaaaaaatc

SEQ ID NO: 3688 - RNA, 21 nt, synthetic construct
  source 1..21: mol_type = other RNA
tactgtaatctgacaagattc

SEQ ID NO: 3689 - RNA, 21 nt, synthetic construct
  source 1..21: mol_type = other RNA
tactgtattaaaataagttcg

SEQ ID NO: 3690 - RNA, 21 nt, synthetic construct
  source 1..21: mol_type = other RNA
tactgtggtaaaaaatttgta

SEQ ID NO: 3691 - RNA, 21 nt, synthetic construct
  source 1..21: mol_type = other RNA
tacttagcattatgtatttca

SEQ ID NO: 3692 - RNA, 21 nt, synthetic construct
  source 1..21: mol_type = other RNA
tacttaggattcacatagatc

SEQ ID NO: 3693 - RNA, 21 nt, synthetic construct
  source 1..21: mol_type = other RNA
tacttgaaaacctacacgaat

SEQ ID NO: 3694 - RNA, 21 nt, synthetic construct
  source 1..21: mol_type = other RNA
tacttttctggaacaaaatat

SEQ ID NO: 3695 - RNA, 21 nt, synthetic construct
  source 1..21: mol_type = other RNA
tagaaataaacctcgtaacaa

SEQ ID NO: 3696 - RNA, 21 nt, synthetic construct
  source 1..21: mol_type = other RNA
tagaatcacagcatatttagg

SEQ ID NO: 3697 - RNA, 21 nt, synthetic construct
  source 1..21: mol_type = other RNA
tagacagtgactttaagataa

SEQ ID NO: 3698 - RNA, 21 nt, synthetic construct
  source 1..21: mol_type = other RNA
tagaccacattaacttggaat

SEQ ID NO: 3699 - RNA, 21 nt, synthetic construct
  source 1..21: mol_type = other RNA
tagaggaagcaactcatatat

SEQ ID NO: 3700 - RNA, 21 nt, synthetic construct
  source 1..21: mol_type = other RNA
tagagttttaacaagagtact

SEQ ID NO: 3701 - RNA, 21 nt, synthetic construct
  source 1..21: mol_type = other RNA
tagatacaaattttttaccac

SEQ ID NO: 3702 - RNA, 21 nt, synthetic construct
  source 1..21: mol_type = other RNA
tagatggtcacaatctagatt

SEQ ID NO: 3703 - RNA, 21 nt, synthetic construct
  source 1..21: mol_type = other RNA
tagattataatcaataggtga

SEQ ID NO: 3704 - RNA, 21 nt, synthetic construct
  source 1..21: mol_type = other RNA
tagattgtgaccatctaaaat

SEQ ID NO: 3705 - RNA, 21 nt, synthetic construct
  source 1..21: mol_type = other RNA
tagcaaaatgaagcatcagtt

SEQ ID NO: 3706 - RNA, 21 nt, synthetic construct
  source 1..21: mol_type = other RNA
tagctcatatgatgcctttta

SEQ ID NO: 3707 - RNA, 21 nt, synthetic construct
  source 1..21: mol_type = other RNA
taggattcacatagatcatac

SEQ ID NO: 3708 - RNA, 21 nt, synthetic construct
  source 1..21: mol_type = other RNA
tagggactgggtctttgttta

SEQ ID NO: 3709 - RNA, 21 nt, synthetic construct
  source 1..21: mol_type = other RNA
tagggatctgttgtgatgtcg

SEQ ID NO: 3710 - RNA, 21 nt, synthetic construct
  source 1..21: mol_type = other RNA
tagggatttagggatctgttg

SEQ ID NO: 3711 - RNA, 21 nt, synthetic construct
  source 1..21: mol_type = other RNA
tagggatttagggatttaggg

SEQ ID NO: 3712 - RNA, 21 nt, synthetic construct
  source 1..21: mol_type = other RNA
tagggccagaataccaaaatg

SEQ ID NO: 3713 - RNA, 21 nt, synthetic construct
  source 1..21: mol_type = other RNA
taggggaaatataaactttaa

SEQ ID NO: 3714 - RNA, 21 nt, synthetic construct
  source 1..21: mol_type = other RNA
taggtcaccatataacttggg

SEQ ID NO: 3715 - RNA, 21 nt, synthetic construct
  source 1..21: mol_type = other RNA
taggtgaacttattaaataac

SEQ ID NO: 3716 - RNA, 21 nt, synthetic construct
  source 1..21: mol_type = other RNA
taggttttcaagtagaaataa

SEQ ID NO: 3717 - RNA, 21 nt, synthetic construct
  source 1..21: mol_type = other RNA
tagtactcttgttaaaactct

SEQ ID NO: 3718 - RNA, 21 nt, synthetic construct
  source 1..21: mol_type = other RNA
tagtagtcatctccatttgtt

SEQ ID NO: 3719 - RNA, 21 nt, synthetic construct
  source 1..21: mol_type = other RNA
tagtcaagtttagagttttaa

SEQ ID NO: 3720 - RNA, 21 nt, synthetic construct
  source 1..21: mol_type = other RNA
tagtcatctccatttgtttaa

SEQ ID NO: 3721 - RNA, 21 nt, synthetic construct
  source 1..21: mol_type = other RNA
tagtctgtggtcctgaaaatt

SEQ ID NO: 3722 - RNA, 21 nt, synthetic construct
  source 1..21: mol_type = other RNA
tagtgatacctcatgttaaag

SEQ ID NO: 3723 - RNA, 21 nt, synthetic construct
  source 1..21: mol_type = other RNA
tagtgcccaagttatatggtg

SEQ ID NO: 3724 - RNA, 21 nt, synthetic construct
  source 1..21: mol_type = other RNA
tagttttttaaactgggaaag

SEQ ID NO: 3725 - RNA, 21 nt, synthetic construct
  source 1..21: mol_type = other RNA
tataaactttaactcgatgcc

SEQ ID NO: 3726 - RNA, 21 nt, synthetic construct
  source 1..21: mol_type = other RNA
tataacttgggcactatatcc

SEQ ID NO: 3727 - RNA, 21 nt, synthetic construct
  source 1..21: mol_type = other RNA
tataatcaataggtgaactta

SEQ ID NO: 3728 - RNA, 21 nt, synthetic construct
  source 1..21: mol_type = other RNA
tataatctagattgtgaccat

SEQ ID NO: 3729 - RNA, 21 nt, synthetic construct
  source 1..21: mol_type = other RNA
tataatttagggactgggtct

SEQ ID NO: 3730 - RNA, 21 nt, synthetic construct
  source 1..21: mol_type = other RNA
tataattttcaggaccacaga

SEQ ID NO: 3731 - RNA, 21 nt, synthetic construct
  source 1..21: mol_type = other RNA
tatacatgcttgtcaggctgt

SEQ ID NO: 3732 - RNA, 21 nt, synthetic construct
  source 1..21: mol_type = other RNA
tatagtgatacctcatgttaa

SEQ ID NO: 3733 - RNA, 21 nt, synthetic construct
  source 1..21: mol_type = other RNA
tatagtgcccaagttatatgg

SEQ ID NO: 3734 - RNA, 21 nt, synthetic construct
  source 1..21: mol_type = other RNA
tatatacatgcttgtcaggct

SEQ ID NO: 3735 - RNA, 21 nt, synthetic construct
  source 1..21: mol_type = other RNA
tatatatgacatgtatattgg

SEQ ID NO: 3736 - RNA, 21 nt, synthetic construct
  source 1..21: mol_type = other RNA
tatatcctttaacaaatgggt

SEQ ID NO: 3737 - RNA, 21 nt, synthetic construct
  source 1..21: mol_type = other RNA
tatatgacatgtatattggat

SEQ ID NO: 3738 - RNA, 21 nt, synthetic construct
  source 1..21: mol_type = other RNA
tatatgagttgcttcctctat

SEQ ID NO: 3739 - RNA, 21 nt, synthetic construct
  source 1..21: mol_type = other RNA
tatatggtgacctacctttgt

SEQ ID NO: 3740 - RNA, 21 nt, synthetic construct
  source 1..21: mol_type = other RNA
tatatttcccctaaatatgct

SEQ ID NO: 3741 - RNA, 21 nt, synthetic construct
  source 1..21: mol_type = other RNA
tatcaaacatttactccaaat

SEQ ID NO: 3742 - RNA, 21 nt, synthetic construct
  source 1..21: mol_type = other RNA
tatcacaactttcccagttta

SEQ ID NO: 3743 - RNA, 21 nt, synthetic construct
  source 1..21: mol_type = other RNA
tatcactataccttatttgtt

SEQ ID NO: 3744 - RNA, 21 nt, synthetic construct
  source 1..21: mol_type = other RNA
tatcacttgtcagaatttatt

SEQ ID NO: 3745 - RNA, 21 nt, synthetic construct
  source 1..21: mol_type = other RNA
tatccaatatacatgtcatat

SEQ ID NO: 3746 - RNA, 21 nt, synthetic construct
  source 1..21: mol_type = other RNA
tatcctttaacaaatgggttt

SEQ ID NO: 3747 - RNA, 21 nt, synthetic construct
  source 1..21: mol_type = other RNA
tatcgacatcacaacagatcc

SEQ ID NO: 3748 - RNA, 21 nt, synthetic construct
  source 1..21: mol_type = other RNA
tatctaatctttagggattta

SEQ ID NO: 3749 - RNA, 21 nt, synthetic construct
  source 1..21: mol_type = other RNA
tatcttaaagtcactgtctat

SEQ ID NO: 3750 - RNA, 21 nt, synthetic construct
  source 1..21: mol_type = other RNA
tatgaaacctaatgaagcaga

SEQ ID NO: 3751 - RNA, 21 nt, synthetic construct
  source 1..21: mol_type = other RNA
tatgacatgtatattggataa

SEQ ID NO: 3752 - RNA, 21 nt, synthetic construct
  source 1..21: mol_type = other RNA
tatgagctaatatcacaactt

SEQ ID NO: 3753 - RNA, 21 nt, synthetic construct
  source 1..21: mol_type = other RNA
tatgatctatgtgaatcctaa

SEQ ID NO: 3754 - RNA, 21 nt, synthetic construct
  source 1..21: mol_type = other RNA
tatgattttttaaaactgcca

SEQ ID NO: 3755 - RNA, 21 nt, synthetic construct
  source 1..21: mol_type = other RNA
tatgctgtgattctaatacat

SEQ ID NO: 3756 - RNA, 21 nt, synthetic construct
  source 1..21: mol_type = other RNA
tatggtgacctacctttgtca

SEQ ID NO: 3757 - RNA, 21 nt, synthetic construct
  source 1..21: mol_type = other RNA
tatgtatgatctatgtgaatc

SEQ ID NO: 3758 - RNA, 21 nt, synthetic construct
  source 1..21: mol_type = other RNA
tatgtgaatcctaagtaaata

SEQ ID NO: 3759 - RNA, 21 nt, synthetic construct
  source 1..21: mol_type = other RNA
tatgtgattgtatgtttaatc

SEQ ID NO: 3760 - RNA, 21 nt, synthetic construct
  source 1..21: mol_type = other RNA
tatgttcattcttactgtaat

SEQ ID NO: 3761 - RNA, 21 nt, synthetic construct
  source 1..21: mol_type = other RNA
tattaaaataagttcgctgtc

SEQ ID NO: 3762 - RNA, 21 nt, synthetic construct
  source 1..21: mol_type = other RNA
tattaaatccttaagagaaag

SEQ ID NO: 3763 - RNA, 21 nt, synthetic construct
  source 1..21: mol_type = other RNA
tattagaatcacagcatattt

SEQ ID NO: 3764 - RNA, 21 nt, synthetic construct
  source 1..21: mol_type = other RNA
tattagaccacattaacttgg

SEQ ID NO: 3765 - RNA, 21 nt, synthetic construct
  source 1..21: mol_type = other RNA
tattagctcatatgatgcctt

SEQ ID NO: 3766 - RNA, 21 nt, synthetic construct
  source 1..21: mol_type = other RNA
tattattttgtacttttctgg

SEQ ID NO: 3767 - RNA, 21 nt, synthetic construct
  source 1..21: mol_type = other RNA
tattcttgcatgtttatcgac

SEQ ID NO: 3768 - RNA, 21 nt, synthetic construct
  source 1..21: mol_type = other RNA
tattctttaaggttatgtgat

SEQ ID NO: 3769 - RNA, 21 nt, synthetic construct
  source 1..21: mol_type = other RNA
tattgacaaaggtaggtcacc

SEQ ID NO: 3770 - RNA, 21 nt, synthetic construct
  source 1..21: mol_type = other RNA
tatttaattctgcttcattag

SEQ ID NO: 3771 - RNA, 21 nt, synthetic construct
  source 1..21: mol_type = other RNA
tatttacttaggattcacata

SEQ ID NO: 3772 - RNA, 21 nt, synthetic construct
  source 1..21: mol_type = other RNA
tatttaggggaaatataaact

SEQ ID NO: 3773 - RNA, 21 nt, synthetic construct
  source 1..21: mol_type = other RNA
tatttagtcaagtttagagtt

SEQ ID NO: 3774 - RNA, 21 nt, synthetic construct
  source 1..21: mol_type = other RNA
tatttatgaaacctaatgaag

SEQ ID NO: 3775 - RNA, 21 nt, synthetic construct
  source 1..21: mol_type = other RNA
tatttcccctaaatatgctgt

SEQ ID NO: 3776 - RNA, 21 nt, synthetic construct
  source 1..21: mol_type = other RNA
tatttctacttgaaaacctac

SEQ ID NO: 3777 - RNA, 21 nt, synthetic construct
  source 1..21: mol_type = other RNA
tatttctcaagctttctctta

SEQ ID NO: 3778 - RNA, 21 nt, synthetic construct
  source 1..21: mol_type = other RNA
tatttgtggcatcgagttaaa

SEQ ID NO: 3779 - RNA, 21 nt, synthetic construct
  source 1..21: mol_type = other RNA
tattttaaaaggcatcatatg

SEQ ID NO: 3780 - RNA, 21 nt, synthetic construct
  source 1..21: mol_type = other RNA
tattttgcatttgaaattgtc

SEQ ID NO: 3781 - RNA, 21 nt, synthetic construct
  source 1..21: mol_type = other RNA
tattttgtacttttctggaac

SEQ ID NO: 3782 - RNA, 21 nt, synthetic construct
  source 1..21: mol_type = other RNA
tattttgtagcaaaatgaagc

SEQ ID NO: 3783 - RNA, 21 nt, synthetic construct
  source 1..21: mol_type = other RNA
tattttgttccagaaaagtac

SEQ ID NO: 3784 - RNA, 21 nt, synthetic construct
  source 1..21: mol_type = other RNA
tcaaaactaaaaatcgtcagc

SEQ ID NO: 3785 - RNA, 21 nt, synthetic construct
  source 1..21: mol_type = other RNA
tcaaacatttactccaaatta

SEQ ID NO: 3786 - RNA, 21 nt, synthetic construct
  source 1..21: mol_type = other RNA
tcaaattatccaatatacatg

SEQ ID NO: 3787 - RNA, 21 nt, synthetic construct
  source 1..21: mol_type = other RNA
tcaagctttctcttaaggatt

SEQ ID NO: 3788 - RNA, 21 nt, synthetic construct
  source 1..21: mol_type = other RNA
tcaagtagaaataaacctcgt

SEQ ID NO: 3789 - RNA, 21 nt, synthetic construct
  source 1..21: mol_type = other RNA
tcaagtttagagttttaacaa

SEQ ID NO: 3790 - RNA, 21 nt, synthetic construct
  source 1..21: mol_type = other RNA
tcaataaacaaagacccagtc

SEQ ID NO: 3791 - RNA, 21 nt, synthetic construct
  source 1..21: mol_type = other RNA
tcaatacttagcattatgtat

SEQ ID NO: 3792 - RNA, 21 nt, synthetic construct
  source 1..21: mol_type = other RNA
tcaataggtgaacttattaaa

SEQ ID NO: 3793 - RNA, 21 nt, synthetic construct
  source 1..21: mol_type = other RNA
tcaatgtgacttagtagtcat

SEQ ID NO: 3794 - RNA, 21 nt, synthetic construct
  source 1..21: mol_type = other RNA
tcaattttagatggtcacaat

SEQ ID NO: 3795 - RNA, 21 nt, synthetic construct
  source 1..21: mol_type = other RNA
tcacaacagatccctaaatcc

SEQ ID NO: 3796 - RNA, 21 nt, synthetic construct
  source 1..21: mol_type = other RNA
tcacaactttcccagtttaaa

SEQ ID NO: 3797 - RNA, 21 nt, synthetic construct
  source 1..21: mol_type = other RNA
tcacaatctagattataatca

SEQ ID NO: 3798 - RNA, 21 nt, synthetic construct
  source 1..21: mol_type = other RNA
tcacagcatatttaggggaaa

SEQ ID NO: 3799 - RNA, 21 nt, synthetic construct
  source 1..21: mol_type = other RNA
tcacataaccttaaagaatac

SEQ ID NO: 3800 - RNA, 21 nt, synthetic construct
  source 1..21: mol_type = other RNA
tcacatagatcatacatatct

SEQ ID NO: 3801 - RNA, 21 nt, synthetic construct
  source 1..21: mol_type = other RNA
tcacattgactttaacatgag

SEQ ID NO: 3802 - RNA, 21 nt, synthetic construct
  source 1..21: mol_type = other RNA
tcaccatataacttgggcact

SEQ ID NO: 3803 - RNA, 21 nt, synthetic construct
  source 1..21: mol_type = other RNA
tcacctattgattataatcta

SEQ ID NO: 3804 - RNA, 21 nt, synthetic construct
  source 1..21: mol_type = other RNA
tcactataccttatttgttaa

SEQ ID NO: 3805 - RNA, 21 nt, synthetic construct
  source 1..21: mol_type = other RNA
tcactgtctatttaagattaa

SEQ ID NO: 3806 - RNA, 21 nt, synthetic construct
  source 1..21: mol_type = other RNA
tcacttgtcagaatttatttt

SEQ ID NO: 3807 - RNA, 21 nt, synthetic construct
  source 1..21: mol_type = other RNA
tcagattacagtaagaatgaa

SEQ ID NO: 3808 - RNA, 21 nt, synthetic construct
  source 1..21: mol_type = other RNA
tcagcacagagtatgtgtaaa

SEQ ID NO: 3809 - RNA, 21 nt, synthetic construct
  source 1..21: mol_type = other RNA
tcagcgttaatttcgacagct

SEQ ID NO: 3810 - RNA, 21 nt, synthetic construct
  source 1..21: mol_type = other RNA
tcaggaccacagactaagctg

SEQ ID NO: 3811 - RNA, 21 nt, synthetic construct
  source 1..21: mol_type = other RNA
tcaggctgtttaaacgttcag

SEQ ID NO: 3812 - RNA, 21 nt, synthetic construct
  source 1..21: mol_type = other RNA
tcagtaacttgttacgaggtt

SEQ ID NO: 3813 - RNA, 21 nt, synthetic construct
  source 1..21: mol_type = other RNA
tcatatcaaacatttactcca

SEQ ID NO: 3814 - RNA, 21 nt, synthetic construct
  source 1..21: mol_type = other RNA
tcatatgagctaatatcacaa

SEQ ID NO: 3815 - RNA, 21 nt, synthetic construct
  source 1..21: mol_type = other RNA
tcatatgatgccttttaaaat

SEQ ID NO: 3816 - RNA, 21 nt, synthetic construct
  source 1..21: mol_type = other RNA
tcatctccatttgtttaaaga

SEQ ID NO: 3817 - RNA, 21 nt, synthetic construct
  source 1..21: mol_type = other RNA
tcatgttaaagtcaatgtgac

SEQ ID NO: 3818 - RNA, 21 nt, synthetic construct
  source 1..21: mol_type = other RNA
tcattccaagttaatgtggtc

SEQ ID NO: 3819 - RNA, 21 nt, synthetic construct
  source 1..21: mol_type = other RNA
tcattcttactgtaatctgac

SEQ ID NO: 3820 - RNA, 21 nt, synthetic construct
  source 1..21: mol_type = other RNA
tccaaattattttgtagcaaa

SEQ ID NO: 3821 - RNA, 21 nt, synthetic construct
  source 1..21: mol_type = other RNA
tccaagttaatgtggtctaat

SEQ ID NO: 3822 - RNA, 21 nt, synthetic construct
  source 1..21: mol_type = other RNA
tccaatatacatgtcatatat

SEQ ID NO: 3823 - RNA, 21 nt, synthetic construct
  source 1..21: mol_type = other RNA
tccaattttgggggaagagag

SEQ ID NO: 3824 - RNA, 21 nt, synthetic construct
  source 1..21: mol_type = other RNA
tccagaaaagtacaaaataat

SEQ ID NO: 3825 - RNA, 21 nt, synthetic construct
  source 1..21: mol_type = other RNA
tccatttgtttaaagacagcg

SEQ ID NO: 3826 - RNA, 21 nt, synthetic construct
  source 1..21: mol_type = other RNA
tcccacatcacaaaatttaaa

SEQ ID NO: 3827 - RNA, 21 nt, synthetic construct
  source 1..21: mol_type = other RNA
tcccagtttaaaaaactagta

SEQ ID NO: 3828 - RNA, 21 nt, synthetic construct
  source 1..21: mol_type = other RNA
tcccccaaaattggacaattt

SEQ ID NO: 3829 - RNA, 21 nt, synthetic construct
  source 1..21: mol_type = other RNA
tcccctaaatatgctgtgatt

SEQ ID NO: 3830 - RNA, 21 nt, synthetic construct
  source 1..21: mol_type = other RNA
tccctaaagattagatacaaa

SEQ ID NO: 3831 - RNA, 21 nt, synthetic construct
  source 1..21: mol_type = other RNA
tccctaaatccctaaagatta

SEQ ID NO: 3832 - RNA, 21 nt, synthetic construct
  source 1..21: mol_type = other RNA
tccctaaatccctaaatccct

SEQ ID NO: 3833 - RNA, 21 nt, synthetic construct
  source 1..21: mol_type = other RNA
tcctaagtaaatattttgttc

SEQ ID NO: 3834 - RNA, 21 nt, synthetic construct
  source 1..21: mol_type = other RNA
tcctctcttcccccaaaattg

SEQ ID NO: 3835 - RNA, 21 nt, synthetic construct
  source 1..21: mol_type = other RNA
tcctctgtatttagtcaagtt

SEQ ID NO: 3836 - RNA, 21 nt, synthetic construct
  source 1..21: mol_type = other RNA
tccttaagagaaagcttgaga

SEQ ID NO: 3837 - RNA, 21 nt, synthetic construct
  source 1..21: mol_type = other RNA
tcctttaacaaatgggtttaa

SEQ ID NO: 3838 - RNA, 21 nt, synthetic construct
  source 1..21: mol_type = other RNA
tcgaaattaacgctgattttt

SEQ ID NO: 3839 - RNA, 21 nt, synthetic construct
  source 1..21: mol_type = other RNA
tcgacagcttagtctgtggtc

SEQ ID NO: 3840 - RNA, 21 nt, synthetic construct
  source 1..21: mol_type = other RNA
tcgacatcacaacagatccct

SEQ ID NO: 3841 - RNA, 21 nt, synthetic construct
  source 1..21: mol_type = other RNA
tcgagttaaagtttatatttc

SEQ ID NO: 3842 - RNA, 21 nt, synthetic construct
  source 1..21: mol_type = other RNA
tcgataaacatgcaagaataa

SEQ ID NO: 3843 - RNA, 21 nt, synthetic construct
  source 1..21: mol_type = other RNA
tcgatgccacaaatatgttca

SEQ ID NO: 3844 - RNA, 21 nt, synthetic construct
  source 1..21: mol_type = other RNA
tcgctgtctttaaacaaatgg

SEQ ID NO: 3845 - RNA, 21 nt, synthetic construct
  source 1..21: mol_type = other RNA
tcgtaacaagttactgaacgt

SEQ ID NO: 3846 - RNA, 21 nt, synthetic construct
  source 1..21: mol_type = other RNA
tcgtcagcacagagtatgtgt

SEQ ID NO: 3847 - RNA, 21 nt, synthetic construct
  source 1..21: mol_type = other RNA
tcgtgtaggttttcaagtaga

SEQ ID NO: 3848 - RNA, 21 nt, synthetic construct
  source 1..21: mol_type = other RNA
tctaaaattgattcccacatc

SEQ ID NO: 3849 - RNA, 21 nt, synthetic construct
  source 1..21: mol_type = other RNA
tctaaacttgactaaatacag

SEQ ID NO: 3850 - RNA, 21 nt, synthetic construct
  source 1..21: mol_type = other RNA
tctaatacattcgtgtaggtt

SEQ ID NO: 3851 - RNA, 21 nt, synthetic construct
  source 1..21: mol_type = other RNA
tctaatctttagggatttagg

SEQ ID NO: 3852 - RNA, 21 nt, synthetic construct
  source 1..21: mol_type = other RNA
tctacttgaaaacctacacga

SEQ ID NO: 3853 - RNA, 21 nt, synthetic construct
  source 1..21: mol_type = other RNA
tctagattataatcaataggt

SEQ ID NO: 3854 - RNA, 21 nt, synthetic construct
  source 1..21: mol_type = other RNA
tctagattgtgaccatctaaa

SEQ ID NO: 3855 - RNA, 21 nt, synthetic construct
  source 1..21: mol_type = other RNA
tctataatttagggactgggt

SEQ ID NO: 3856 - RNA, 21 nt, synthetic construct
  source 1..21: mol_type = other RNA
tctataattttcaggaccaca

SEQ ID NO: 3857 - RNA, 21 nt, synthetic construct
  source 1..21: mol_type = other RNA
tctatgtgaatcctaagtaaa

SEQ ID NO: 3858 - RNA, 21 nt, synthetic construct
  source 1..21: mol_type = other RNA
tctatttctcaagctttctct

SEQ ID NO: 3859 - RNA, 21 nt, synthetic construct
  source 1..21: mol_type = other RNA
tctcaagctttctcttaagga

SEQ ID NO: 3860 - RNA, 21 nt, synthetic construct
  source 1..21: mol_type = other RNA
tctccatttgtttaaagacag

SEQ ID NO: 3861 - RNA, 21 nt, synthetic construct
  source 1..21: mol_type = other RNA
tctcttaaggatttaatacca

SEQ ID NO: 3862 - RNA, 21 nt, synthetic construct
  source 1..21: mol_type = other RNA
tctcttcccccaaaattggac

SEQ ID NO: 3863 - RNA, 21 nt, synthetic construct
  source 1..21: mol_type = other RNA
tctgacaagattcctttacaa

SEQ ID NO: 3864 - RNA, 21 nt, synthetic construct
  source 1..21: mol_type = other RNA
tctgacaagtgatactgtggt

SEQ ID NO: 3865 - RNA, 21 nt, synthetic construct
  source 1..21: mol_type = other RNA
tctgcttcattaggtttcata

SEQ ID NO: 3866 - RNA, 21 nt, synthetic construct
  source 1..21: mol_type = other RNA
tctggaacaaaatatttactt

SEQ ID NO: 3867 - RNA, 21 nt, synthetic construct
  source 1..21: mol_type = other RNA
tctggtattaaatccttaaga

SEQ ID NO: 3868 - RNA, 21 nt, synthetic construct
  source 1..21: mol_type = other RNA
tctgtatttagtcaagtttag

SEQ ID NO: 3869 - RNA, 21 nt, synthetic construct
  source 1..21: mol_type = other RNA
tctgtgctgacgatttttagt

SEQ ID NO: 3870 - RNA, 21 nt, synthetic construct
  source 1..21: mol_type = other RNA
tctgtggtcctgaaaattata

SEQ ID NO: 3871 - RNA, 21 nt, synthetic construct
  source 1..21: mol_type = other RNA
tctgttgtgatgtcgataaac

SEQ ID NO: 3872 - RNA, 21 nt, synthetic construct
  source 1..21: mol_type = other RNA
tcttaaagtcactgtctattt

SEQ ID NO: 3873 - RNA, 21 nt, synthetic construct
  source 1..21: mol_type = other RNA
tcttaaatagacagtgacttt

SEQ ID NO: 3874 - RNA, 21 nt, synthetic construct
  source 1..21: mol_type = other RNA
tcttaaggatttaataccaga

SEQ ID NO: 3875 - RNA, 21 nt, synthetic construct
  source 1..21: mol_type = other RNA
tcttactggcagttttaaaaa

SEQ ID NO: 3876 - RNA, 21 nt, synthetic construct
  source 1..21: mol_type = other RNA
tcttactgtaatctgacaaga

SEQ ID NO: 3877 - RNA, 21 nt, synthetic construct
  source 1..21: mol_type = other RNA
tcttcccccaaaattggacaa

SEQ ID NO: 3878 - RNA, 21 nt, synthetic construct
  source 1..21: mol_type = other RNA
tcttgcatgtttatcgacatc

SEQ ID NO: 3879 - RNA, 21 nt, synthetic construct
  source 1..21: mol_type = other RNA
tcttgtcagattacagtaaga

SEQ ID NO: 3880 - RNA, 21 nt, synthetic construct
  source 1..21: mol_type = other RNA
tcttgttaaaactctaaactt

SEQ ID NO: 3881 - RNA, 21 nt, synthetic construct
  source 1..21: mol_type = other RNA
tctttaaacaaatggagatga

SEQ ID NO: 3882 - RNA, 21 nt, synthetic construct
  source 1..21: mol_type = other RNA
tctttaaggttatgtgattgt

SEQ ID NO: 3883 - RNA, 21 nt, synthetic construct
  source 1..21: mol_type = other RNA
tctttagggatttagggattt

SEQ ID NO: 3884 - RNA, 21 nt, synthetic construct
  source 1..21: mol_type = other RNA
tgaaaacctacacgaatgtat

SEQ ID NO: 3885 - RNA, 21 nt, synthetic construct
  source 1..21: mol_type = other RNA
tgaaacctaatgaagcagaat

SEQ ID NO: 3886 - RNA, 21 nt, synthetic construct
  source 1..21: mol_type = other RNA
tgaaatacataatgctaagta

SEQ ID NO: 3887 - RNA, 21 nt, synthetic construct
  source 1..21: mol_type = other RNA
tgaaattgtccaattttgggg

SEQ ID NO: 3888 - RNA, 21 nt, synthetic construct
  source 1..21: mol_type = other RNA
tgaacatatttgtggcatcga

SEQ ID NO: 3889 - RNA, 21 nt, synthetic construct
  source 1..21: mol_type = other RNA
tgaacgtttaaacagcctgac

SEQ ID NO: 3890 - RNA, 21 nt, synthetic construct
  source 1..21: mol_type = other RNA
tgaagcagaattaaatactgt

SEQ ID NO: 3891 - RNA, 21 nt, synthetic construct
  source 1..21: mol_type = other RNA
tgaagcatcagtttaaaaatt

SEQ ID NO: 3892 - RNA, 21 nt, synthetic construct
  source 1..21: mol_type = other RNA
tgacaaaggtaggtcaccata

SEQ ID NO: 3893 - RNA, 21 nt, synthetic construct
  source 1..21: mol_type = other RNA
tgacaagattcctttacaatt

SEQ ID NO: 3894 - RNA, 21 nt, synthetic construct
  source 1..21: mol_type = other RNA
tgacaagcatgtatatatgtt

SEQ ID NO: 3895 - RNA, 21 nt, synthetic construct
  source 1..21: mol_type = other RNA
tgacaagtgatactgtggtaa

SEQ ID NO: 3896 - RNA, 21 nt, synthetic construct
  source 1..21: mol_type = other RNA
tgacatgtatattggataatt

SEQ ID NO: 3897 - RNA, 21 nt, synthetic construct
  source 1..21: mol_type = other RNA
tgaccatctaaaattgattcc

SEQ ID NO: 3898 - RNA, 21 nt, synthetic construct
  source 1..21: mol_type = other RNA
tgacctacctttgtcaatact

SEQ ID NO: 3899 - RNA, 21 nt, synthetic construct
  source 1..21: mol_type = other RNA
tgacgatttttagttttgaaa

SEQ ID NO: 3900 - RNA, 21 nt, synthetic construct
  source 1..21: mol_type = other RNA
tgactaaatacagaggactgg

SEQ ID NO: 3901 - RNA, 21 nt, synthetic construct
  source 1..21: mol_type = other RNA
tgactactaagtcacattgac

SEQ ID NO: 3902 - RNA, 21 nt, synthetic construct
  source 1..21: mol_type = other RNA
tgacttagtagtcatctccat

SEQ ID NO: 3903 - RNA, 21 nt, synthetic construct
  source 1..21: mol_type = other RNA
tgactttaacatgaggtatca

SEQ ID NO: 3904 - RNA, 21 nt, synthetic construct
  source 1..21: mol_type = other RNA
tgagaaatgtaaacggtattc

SEQ ID NO: 3905 - RNA, 21 nt, synthetic construct
  source 1..21: mol_type = other RNA
tgagctaatatcacaactttc

SEQ ID NO: 3906 - RNA, 21 nt, synthetic construct
  source 1..21: mol_type = other RNA
tgaggcaaatttaaaaggcaa

SEQ ID NO: 3907 - RNA, 21 nt, synthetic construct
  source 1..21: mol_type = other RNA
tgaggtatcactataccttat

SEQ ID NO: 3908 - RNA, 21 nt, synthetic construct
  source 1..21: mol_type = other RNA
tgatacctcatgttaaagtca

SEQ ID NO: 3909 - RNA, 21 nt, synthetic construct
  source 1..21: mol_type = other RNA
tgatactgtggtaaaaaattt

SEQ ID NO: 3910 - RNA, 21 nt, synthetic construct
  source 1..21: mol_type = other RNA
tgatattagctcatatgatgc

SEQ ID NO: 3911 - RNA, 21 nt, synthetic construct
  source 1..21: mol_type = other RNA
tgatctatgtgaatcctaagt

SEQ ID NO: 3912 - RNA, 21 nt, synthetic construct
  source 1..21: mol_type = other RNA
tgatgccttttaaaataaaag

SEQ ID NO: 3913 - RNA, 21 nt, synthetic construct
  source 1..21: mol_type = other RNA
tgatgcttcattttgctacaa

SEQ ID NO: 3914 - RNA, 21 nt, synthetic construct
  source 1..21: mol_type = other RNA
tgatgtcgataaacatgcaag

SEQ ID NO: 3915 - RNA, 21 nt, synthetic construct
  source 1..21: mol_type = other RNA
tgatgtgggaatcaattttag

SEQ ID NO: 3916 - RNA, 21 nt, synthetic construct
  source 1..21: mol_type = other RNA
tgattataatctagattgtga

SEQ ID NO: 3917 - RNA, 21 nt, synthetic construct
  source 1..21: mol_type = other RNA
tgattcccacatcacaaaatt

SEQ ID NO: 3918 - RNA, 21 nt, synthetic construct
  source 1..21: mol_type = other RNA
tgattctaatacattcgtgta

SEQ ID NO: 3919 - RNA, 21 nt, synthetic construct
  source 1..21: mol_type = other RNA
tgattgagaaatgtaaacggt

SEQ ID NO: 3920 - RNA, 21 nt, synthetic construct
  source 1..21: mol_type = other RNA
tgattttttaaaactgccagt

SEQ ID NO: 3921 - RNA, 21 nt, synthetic construct
  source 1..21: mol_type = other RNA
tgcatgtttatcgacatcaca

SEQ ID NO: 3922 - RNA, 21 nt, synthetic construct
  source 1..21: mol_type = other RNA
tgcatttgaaattgtccaatt

SEQ ID NO: 3923 - RNA, 21 nt, synthetic construct
  source 1..21: mol_type = other RNA
tgccacaaatatgttcattct

SEQ ID NO: 3924 - RNA, 21 nt, synthetic construct
  source 1..21: mol_type = other RNA
tgccagtaagaaattttaaat

SEQ ID NO: 3925 - RNA, 21 nt, synthetic construct
  source 1..21: mol_type = other RNA
tgcccaagttatatggtgacc

SEQ ID NO: 3926 - RNA, 21 nt, synthetic construct
  source 1..21: mol_type = other RNA
tgccttttaaaataaaagtct

SEQ ID NO: 3927 - RNA, 21 nt, synthetic construct
  source 1..21: mol_type = other RNA
tgctaagtattgacaaaggta

SEQ ID NO: 3928 - RNA, 21 nt, synthetic construct
  source 1..21: mol_type = other RNA
tgctacaaaataatttggagt

SEQ ID NO: 3929 - RNA, 21 nt, synthetic construct
  source 1..21: mol_type = other RNA
tgctgacgatttttagttttg

SEQ ID NO: 3930 - RNA, 21 nt, synthetic construct
  source 1..21: mol_type = other RNA
tgctgtgattctaatacattc

SEQ ID NO: 3931 - RNA, 21 nt, synthetic construct
  source 1..21: mol_type = other RNA
tgcttcattaggtttcataaa

SEQ ID NO: 3932 - RNA, 21 nt, synthetic construct
  source 1..21: mol_type = other RNA
tgcttcattttgctacaaaat

SEQ ID NO: 3933 - RNA, 21 nt, synthetic construct
  source 1..21: mol_type = other RNA
tgcttgtcaggctgtttaaac

SEQ ID NO: 3934 - RNA, 21 nt, synthetic construct
  source 1..21: mol_type = other RNA
tggaacaaaatatttacttag

SEQ ID NO: 3935 - RNA, 21 nt, synthetic construct
  source 1..21: mol_type = other RNA
tggaatgaggttaatgtttaa

SEQ ID NO: 3936 - RNA, 21 nt, synthetic construct
  source 1..21: mol_type = other RNA
tggacaatttcaaatgcaaaa

SEQ ID NO: 3937 - RNA, 21 nt, synthetic construct
  source 1..21: mol_type = other RNA
tggagatgactactaagtcac

SEQ ID NO: 3938 - RNA, 21 nt, synthetic construct
  source 1..21: mol_type = other RNA
tggagtaaatgtttgatatga

SEQ ID NO: 3939 - RNA, 21 nt, synthetic construct
  source 1..21: mol_type = other RNA
tggcagttttaaaaaatcata

SEQ ID NO: 3940 - RNA, 21 nt, synthetic construct
  source 1..21: mol_type = other RNA
tggcatcgagttaaagtttat

SEQ ID NO: 3941 - RNA, 21 nt, synthetic construct
  source 1..21: mol_type = other RNA
tggctcctctcttcccccaaa

SEQ ID NO: 3942 - RNA, 21 nt, synthetic construct
  source 1..21: mol_type = other RNA
tgggaaagttgtgatattagc

SEQ ID NO: 3943 - RNA, 21 nt, synthetic construct
  source 1..21: mol_type = other RNA
tgggaatcaattttagatggt

SEQ ID NO: 3944 - RNA, 21 nt, synthetic construct
  source 1..21: mol_type = other RNA
tgggcactatatcctttaaca

SEQ ID NO: 3945 - RNA, 21 nt, synthetic construct
  source 1..21: mol_type = other RNA
tgggggaagagaggagccatt

SEQ ID NO: 3946 - RNA, 21 nt, synthetic construct
  source 1..21: mol_type = other RNA
tgggtctttgtttattgaatt

SEQ ID NO: 3947 - RNA, 21 nt, synthetic construct
  source 1..21: mol_type = other RNA
tggtaattgtacagttcttaa

SEQ ID NO: 3948 - RNA, 21 nt, synthetic construct
  source 1..21: mol_type = other RNA
tggtattaaatccttaagaga

SEQ ID NO: 3949 - RNA, 21 nt, synthetic construct
  source 1..21: mol_type = other RNA
tggtattctggccctaaaaaa

SEQ ID NO: 3950 - RNA, 21 nt, synthetic construct
  source 1..21: mol_type = other RNA
tggtcacaatctagattataa

SEQ ID NO: 3951 - RNA, 21 nt, synthetic construct
  source 1..21: mol_type = other RNA
tggtcctgaaaattatagatt

SEQ ID NO: 3952 - RNA, 21 nt, synthetic construct
  source 1..21: mol_type = other RNA
tggtctaataatctggtatta

SEQ ID NO: 3953 - RNA, 21 nt, synthetic construct
  source 1..21: mol_type = other RNA
tggtgacctacctttgtcaat

SEQ ID NO: 3954 - RNA, 21 nt, synthetic construct
  source 1..21: mol_type = other RNA
tgtaaacggtattctttaagg

SEQ ID NO: 3955 - RNA, 21 nt, synthetic construct
  source 1..21: mol_type = other RNA
tgtaaaggaatcttgtcagat

SEQ ID NO: 3956 - RNA, 21 nt, synthetic construct
  source 1..21: mol_type = other RNA
tgtaatctgacaagattcctt

SEQ ID NO: 3957 - RNA, 21 nt, synthetic construct
  source 1..21: mol_type = other RNA
tgtacaattaccagtcctctg

SEQ ID NO: 3958 - RNA, 21 nt, synthetic construct
  source 1..21: mol_type = other RNA
tgtacagttcttaaatgttgt

SEQ ID NO: 3959 - RNA, 21 nt, synthetic construct
  source 1..21: mol_type = other RNA
tgtacttttctggaacaaaat

SEQ ID NO: 3960 - RNA, 21 nt, synthetic construct
  source 1..21: mol_type = other RNA
tgtagcaaaatgaagcatcag

SEQ ID NO: 3961 - RNA, 21 nt, synthetic construct
  source 1..21: mol_type = other RNA
tgtaggttttcaagtagaaat

SEQ ID NO: 3962 - RNA, 21 nt, synthetic construct
  source 1..21: mol_type = other RNA
tgtatctaatctttagggatt

SEQ ID NO: 3963 - RNA, 21 nt, synthetic construct
  source 1..21: mol_type = other RNA
tgtatgatctatgtgaatcct

SEQ ID NO: 3964 - RNA, 21 nt, synthetic construct
  source 1..21: mol_type = other RNA
tgtattaaaataagttcgctg

SEQ ID NO: 3965 - RNA, 21 nt, synthetic construct
  source 1..21: mol_type = other RNA
tgtattacagatttttacaca

SEQ ID NO: 3966 - RNA, 21 nt, synthetic construct
  source 1..21: mol_type = other RNA
tgtattagaatcacagcatat

SEQ ID NO: 3967 - RNA, 21 nt, synthetic construct
  source 1..21: mol_type = other RNA
tgtatttagtcaagtttagag

SEQ ID NO: 3968 - RNA, 21 nt, synthetic construct
  source 1..21: mol_type = other RNA
tgtcaatacttagcattatgt

SEQ ID NO: 3969 - RNA, 21 nt, synthetic construct
  source 1..21: mol_type = other RNA
tgtcagattacagtaagaatg

SEQ ID NO: 3970 - RNA, 21 nt, synthetic construct
  source 1..21: mol_type = other RNA
tgtcaggctgtttaaacgttc

SEQ ID NO: 3971 - RNA, 21 nt, synthetic construct
  source 1..21: mol_type = other RNA
tgtccaattttgggggaagag

SEQ ID NO: 3972 - RNA, 21 nt, synthetic construct
  source 1..21: mol_type = other RNA
tgtcgaaattaacgctgattt

SEQ ID NO: 3973 - RNA, 21 nt, synthetic construct
  source 1..21: mol_type = other RNA
tgtcgataaacatgcaagaat

SEQ ID NO: 3974 - RNA, 21 nt, synthetic construct
  source 1..21: mol_type = other RNA
tgtctttaaacaaatggagat

SEQ ID NO: 3975 - RNA, 21 nt, synthetic construct
  source 1..21: mol_type = other RNA
tgtgaatcctaagtaaatatt

SEQ ID NO: 3976 - RNA, 21 nt, synthetic construct
  source 1..21: mol_type = other RNA
tgtgaccatctaaaattgatt

SEQ ID NO: 3977 - RNA, 21 nt, synthetic construct
  source 1..21: mol_type = other RNA
tgtgacttagtagtcatctcc

SEQ ID NO: 3978 - RNA, 21 nt, synthetic construct
  source 1..21: mol_type = other RNA
tgtgatattagctcatatgat

SEQ ID NO: 3979 - RNA, 21 nt, synthetic construct
  source 1..21: mol_type = other RNA
tgtgatgtcgataaacatgca

SEQ ID NO: 3980 - RNA, 21 nt, synthetic construct
  source 1..21: mol_type = other RNA
tgtgatgtgggaatcaatttt

SEQ ID NO: 3981 - RNA, 21 nt, synthetic construct
  source 1..21: mol_type = other RNA
tgtgattctaatacattcgtg

SEQ ID NO: 3982 - RNA, 21 nt, synthetic construct
  source 1..21: mol_type = other RNA
tgtgattgtatgtttaatctt

SEQ ID NO: 3983 - RNA, 21 nt, synthetic construct
  source 1..21: mol_type = other RNA
tgtgctgacgatttttagttt

SEQ ID NO: 3984 - RNA, 21 nt, synthetic construct
  source 1..21: mol_type = other RNA
tgtggcatcgagttaaagttt

SEQ ID NO: 3985 - RNA, 21 nt, synthetic construct
  source 1..21: mol_type = other RNA
tgtgggaatcaattttagatg

SEQ ID NO: 3986 - RNA, 21 nt, synthetic construct
  source 1..21: mol_type = other RNA
tgtggtaaaaaatttgtatct

SEQ ID NO: 3987 - RNA, 21 nt, synthetic construct
  source 1..21: mol_type = other RNA
tgtggtcctgaaaattataga

SEQ ID NO: 3988 - RNA, 21 nt, synthetic construct
  source 1..21: mol_type = other RNA
tgtggtctaataatctggtat

SEQ ID NO: 3989 - RNA, 21 nt, synthetic construct
  source 1..21: mol_type = other RNA
tgtgtaaaaatctgtaataca

SEQ ID NO: 3990 - RNA, 21 nt, synthetic construct
  source 1..21: mol_type = other RNA
tgttaaaactctaaacttgac

SEQ ID NO: 3991 - RNA, 21 nt, synthetic construct
  source 1..21: mol_type = other RNA
tgttaaaggatatagtgccca

SEQ ID NO: 3992 - RNA, 21 nt, synthetic construct
  source 1..21: mol_type = other RNA
tgttaaagtcaatgtgactta

SEQ ID NO: 3993 - RNA, 21 nt, synthetic construct
  source 1..21: mol_type = other RNA
tgttacgaggtttatttctac

SEQ ID NO: 3994 - RNA, 21 nt, synthetic construct
  source 1..21: mol_type = other RNA
tgttcattcttactgtaatct

SEQ ID NO: 3995 - RNA, 21 nt, synthetic construct
  source 1..21: mol_type = other RNA
tgttccagaaaagtacaaaat

SEQ ID NO: 3996 - RNA, 21 nt, synthetic construct
  source 1..21: mol_type = other RNA
tgttgtgatgtcgataaacat

SEQ ID NO: 3997 - RNA, 21 nt, synthetic construct
  source 1..21: mol_type = other RNA
tgtttaaacgttcagtaactt

SEQ ID NO: 3998 - RNA, 21 nt, synthetic construct
  source 1..21: mol_type = other RNA
tgtttaaagacagcgaactta

SEQ ID NO: 3999 - RNA, 21 nt, synthetic construct
  source 1..21: mol_type = other RNA
tgtttaatcttaaatagacag

SEQ ID NO: 4000 - RNA, 21 nt, synthetic construct
  source 1..21: mol_type = other RNA
tgtttatcgacatcacaacag

SEQ ID NO: 4001 - RNA, 21 nt, synthetic construct
  source 1..21: mol_type = other RNA
tgttttaaattttgtgatgtg

SEQ ID NO: 4002 - RNA, 21 nt, synthetic construct
  source 1..21: mol_type = other RNA
tgttttcatagtattaagtgt

SEQ ID NO: 4003 - RNA, 21 nt, synthetic construct
  source 1..21: mol_type = other RNA
ttaaaaaactagtactcttgt

SEQ ID NO: 4004 - RNA, 21 nt, synthetic construct
  source 1..21: mol_type = other RNA
ttaaaactctaaacttgacta

SEQ ID NO: 4005 - RNA, 21 nt, synthetic construct
  source 1..21: mol_type = other RNA
ttaaaactgccagtaagaaat

SEQ ID NO: 4006 - RNA, 21 nt, synthetic construct
  source 1..21: mol_type = other RNA
ttaaaaggcatcatatgagct

SEQ ID NO: 4007 - RNA, 21 nt, synthetic construct
  source 1..21: mol_type = other RNA
ttaaaataagttcgctgtctt

SEQ ID NO: 4008 - RNA, 21 nt, synthetic construct
  source 1..21: mol_type = other RNA
ttaaaatttcttactggcagt

SEQ ID NO: 4009 - RNA, 21 nt, synthetic construct
  source 1..21: mol_type = other RNA
ttaaacaaatggagatgacta

SEQ ID NO: 4010 - RNA, 21 nt, synthetic construct
  source 1..21: mol_type = other RNA
ttaaacagcctgacaagcatg

SEQ ID NO: 4011 - RNA, 21 nt, synthetic construct
  source 1..21: mol_type = other RNA
ttaaacatacaatcacataac

SEQ ID NO: 4012 - RNA, 21 nt, synthetic construct
  source 1..21: mol_type = other RNA
ttaaacatatatacatgcttg

SEQ ID NO: 4013 - RNA, 21 nt, synthetic construct
  source 1..21: mol_type = other RNA
ttaaacattaacctcattcca

SEQ ID NO: 4014 - RNA, 21 nt, synthetic construct
  source 1..21: mol_type = other RNA
ttaaacccatttgttaaagga

SEQ ID NO: 4015 - RNA, 21 nt, synthetic construct
  source 1..21: mol_type = other RNA
ttaaacgttcagtaacttgtt

SEQ ID NO: 4016 - RNA, 21 nt, synthetic construct
  source 1..21: mol_type = other RNA
ttaaactgatgcttcattttg

SEQ ID NO: 4017 - RNA, 21 nt, synthetic construct
  source 1..21: mol_type = other RNA
ttaaactgggaaagttgtgat

SEQ ID NO: 4018 - RNA, 21 nt, synthetic construct
  source 1..21: mol_type = other RNA
ttaaagaataccgtttacatt

SEQ ID NO: 4019 - RNA, 21 nt, synthetic construct
  source 1..21: mol_type = other RNA
ttaaagacagcgaacttattt

SEQ ID NO: 4020 - RNA, 21 nt, synthetic construct
  source 1..21: mol_type = other RNA
ttaaaggatatagtgcccaag

SEQ ID NO: 4021 - RNA, 21 nt, synthetic construct
  source 1..21: mol_type = other RNA
ttaaagtcaatgtgacttagt

SEQ ID NO: 4022 - RNA, 21 nt, synthetic construct
  source 1..21: mol_type = other RNA
ttaaagtcactgtctatttaa

SEQ ID NO: 4023 - RNA, 21 nt, synthetic construct
  source 1..21: mol_type = other RNA
ttaaagtttatatttccccta

SEQ ID NO: 4024 - RNA, 21 nt, synthetic construct
  source 1..21: mol_type = other RNA
ttaaatagacagtgactttaa

SEQ ID NO: 4025 - RNA, 21 nt, synthetic construct
  source 1..21: mol_type = other RNA
ttaaatccttaagagaaagct

SEQ ID NO: 4026 - RNA, 21 nt, synthetic construct
  source 1..21: mol_type = other RNA
ttaaattttgtgatgtgggaa

SEQ ID NO: 4027 - RNA, 21 nt, synthetic construct
  source 1..21: mol_type = other RNA
ttaacaaataaggtatagtga

SEQ ID NO: 4028 - RNA, 21 nt, synthetic construct
  source 1..21: mol_type = other RNA
ttaacaagagtactagttttt

SEQ ID NO: 4029 - RNA, 21 nt, synthetic construct
  source 1..21: mol_type = other RNA
ttaacatgaggtatcactata

SEQ ID NO: 4030 - RNA, 21 nt, synthetic construct
  source 1..21: mol_type = other RNA
ttaacctcattccaagttaat

SEQ ID NO: 4031 - RNA, 21 nt, synthetic construct
  source 1..21: mol_type = other RNA
ttaactcgatgccacaaatat

SEQ ID NO: 4032 - RNA, 21 nt, synthetic construct
  source 1..21: mol_type = other RNA
ttaacttggaatgaggttaat

SEQ ID NO: 4033 - RNA, 21 nt, synthetic construct
  source 1..21: mol_type = other RNA
ttaagaactgtacaattacca

SEQ ID NO: 4034 - RNA, 21 nt, synthetic construct
  source 1..21: mol_type = other RNA
ttaagagaaagcttgagaaat

SEQ ID NO: 4035 - RNA, 21 nt, synthetic construct
  source 1..21: mol_type = other RNA
ttaaggatttaataccagatt

SEQ ID NO: 4036 - RNA, 21 nt, synthetic construct
  source 1..21: mol_type = other RNA
ttaaggttatgtgattgtatg

SEQ ID NO: 4037 - RNA, 21 nt, synthetic construct
  source 1..21: mol_type = other RNA
ttaataagttcacctattgat

SEQ ID NO: 4038 - RNA, 21 nt, synthetic construct
  source 1..21: mol_type = other RNA
ttaataccagattattagacc

SEQ ID NO: 4039 - RNA, 21 nt, synthetic construct
  source 1..21: mol_type = other RNA
ttaatatatgagttgcttcct

SEQ ID NO: 4040 - RNA, 21 nt, synthetic construct
  source 1..21: mol_type = other RNA
ttaatcttaaatagacagtga

SEQ ID NO: 4041 - RNA, 21 nt, synthetic construct
  source 1..21: mol_type = other RNA
ttaatgtggtctaataatctg

SEQ ID NO: 4042 - RNA, 21 nt, synthetic construct
  source 1..21: mol_type = other RNA
ttaattctgcttcattaggtt

SEQ ID NO: 4043 - RNA, 21 nt, synthetic construct
  source 1..21: mol_type = other RNA
ttaatttcgacagcttagtct

SEQ ID NO: 4044 - RNA, 21 nt, synthetic construct
  source 1..21: mol_type = other RNA
ttacacatactctgtgctgac

SEQ ID NO: 4045 - RNA, 21 nt, synthetic construct
  source 1..21: mol_type = other RNA
ttacagatttttacacatact

SEQ ID NO: 4046 - RNA, 21 nt, synthetic construct
  source 1..21: mol_type = other RNA
ttacagtaagaatgaacatat

SEQ ID NO: 4047 - RNA, 21 nt, synthetic construct
  source 1..21: mol_type = other RNA
ttaccacagtatcacttgtca

SEQ ID NO: 4048 - RNA, 21 nt, synthetic construct
  source 1..21: mol_type = other RNA
ttaccagtcctctgtatttag

SEQ ID NO: 4049 - RNA, 21 nt, synthetic construct
  source 1..21: mol_type = other RNA
ttacgaggtttatttctactt

SEQ ID NO: 4050 - RNA, 21 nt, synthetic construct
  source 1..21: mol_type = other RNA
ttactccaaattattttgtag

SEQ ID NO: 4051 - RNA, 21 nt, synthetic construct
  source 1..21: mol_type = other RNA
ttactgaacgtttaaacagcc

SEQ ID NO: 4052 - RNA, 21 nt, synthetic construct
  source 1..21: mol_type = other RNA
ttactggcagttttaaaaaat

SEQ ID NO: 4053 - RNA, 21 nt, synthetic construct
  source 1..21: mol_type = other RNA
ttactgtaatctgacaagatt

SEQ ID NO: 4054 - RNA, 21 nt, synthetic construct
  source 1..21: mol_type = other RNA
ttacttaggattcacatagat

SEQ ID NO: 4055 - RNA, 21 nt, synthetic construct
  source 1..21: mol_type = other RNA
ttagaatcacagcatatttag

SEQ ID NO: 4056 - RNA, 21 nt, synthetic construct
  source 1..21: mol_type = other RNA
ttagaccacattaacttggaa

SEQ ID NO: 4057 - RNA, 21 nt, synthetic construct
  source 1..21: mol_type = other RNA
ttagagttttaacaagagtac

SEQ ID NO: 4058 - RNA, 21 nt, synthetic construct
  source 1..21: mol_type = other RNA
ttagatggtcacaatctagat

SEQ ID NO: 4059 - RNA, 21 nt, synthetic construct
  source 1..21: mol_type = other RNA
ttagctcatatgatgcctttt

SEQ ID NO: 4060 - RNA, 21 nt, synthetic construct
  source 1..21: mol_type = other RNA
ttaggattcacatagatcata

SEQ ID NO: 4061 - RNA, 21 nt, synthetic construct
  source 1..21: mol_type = other RNA
ttagggactgggtctttgttt

SEQ ID NO: 4062 - RNA, 21 nt, synthetic construct
  source 1..21: mol_type = other RNA
ttagggatctgttgtgatgtc

SEQ ID NO: 4063 - RNA, 21 nt, synthetic construct
  source 1..21: mol_type = other RNA
ttagggatttagggatctgtt

SEQ ID NO: 4064 - RNA, 21 nt, synthetic construct
  source 1..21: mol_type = other RNA
ttagggatttagggatttagg

SEQ ID NO: 4065 - RNA, 21 nt, synthetic construct
  source 1..21: mol_type = other RNA
ttagggccagaataccaaaat

SEQ ID NO: 4066 - RNA, 21 nt, synthetic construct
  source 1..21: mol_type = other RNA
ttaggggaaatataaacttta

SEQ ID NO: 4067 - RNA, 21 nt, synthetic construct
  source 1..21: mol_type = other RNA
ttagtagtcatctccatttgt

SEQ ID NO: 4068 - RNA, 21 nt, synthetic construct
  source 1..21: mol_type = other RNA
ttagtcaagtttagagtttta

SEQ ID NO: 4069 - RNA, 21 nt, synthetic construct
  source 1..21: mol_type = other RNA
ttagtctgtggtcctgaaaat

SEQ ID NO: 4070 - RNA, 21 nt, synthetic construct
  source 1..21: mol_type = other RNA
ttataatcaataggtgaactt

SEQ ID NO: 4071 - RNA, 21 nt, synthetic construct
  source 1..21: mol_type = other RNA
ttataatctagattgtgacca

SEQ ID NO: 4072 - RNA, 21 nt, synthetic construct
  source 1..21: mol_type = other RNA
ttatatggtgacctacctttg

SEQ ID NO: 4073 - RNA, 21 nt, synthetic construct
  source 1..21: mol_type = other RNA
ttatatttcccctaaatatgc

SEQ ID NO: 4074 - RNA, 21 nt, synthetic construct
  source 1..21: mol_type = other RNA
ttatccaatatacatgtcata

SEQ ID NO: 4075 - RNA, 21 nt, synthetic construct
  source 1..21: mol_type = other RNA
ttatcgacatcacaacagatc

SEQ ID NO: 4076 - RNA, 21 nt, synthetic construct
  source 1..21: mol_type = other RNA
ttatcttaaagtcactgtcta

SEQ ID NO: 4077 - RNA, 21 nt, synthetic construct
  source 1..21: mol_type = other RNA
ttatgaaacctaatgaagcag

SEQ ID NO: 4078 - RNA, 21 nt, synthetic construct
  source 1..21: mol_type = other RNA
ttattagaccacattaacttg

SEQ ID NO: 4079 - RNA, 21 nt, synthetic construct
  source 1..21: mol_type = other RNA
ttattcttgcatgtttatcga

SEQ ID NO: 4080 - RNA, 21 nt, synthetic construct
  source 1..21: mol_type = other RNA
ttatttctacttgaaaaccta

SEQ ID NO: 4081 - RNA, 21 nt, synthetic construct
  source 1..21: mol_type = other RNA
ttattttgtacttttctggaa

SEQ ID NO: 4082 - RNA, 21 nt, synthetic construct
  source 1..21: mol_type = other RNA
ttattttgtagcaaaatgaag

SEQ ID NO: 4083 - RNA, 21 nt, synthetic construct
  source 1..21: mol_type = other RNA
ttcaaaactaaaaatcgtcag

SEQ ID NO: 4084 - RNA, 21 nt, synthetic construct
  source 1..21: mol_type = other RNA
ttcaagtagaaataaacctcg

SEQ ID NO: 4085 - RNA, 21 nt, synthetic construct
  source 1..21: mol_type = other RNA
ttcaataaacaaagacccagt

SEQ ID NO: 4086 - RNA, 21 nt, synthetic construct
  source 1..21: mol_type = other RNA
ttcacatagatcatacatatc

SEQ ID NO: 4087 - RNA, 21 nt, synthetic construct
  source 1..21: mol_type = other RNA
ttcacctattgattataatct

SEQ ID NO: 4088 - RNA, 21 nt, synthetic construct
  source 1..21: mol_type = other RNA
ttcaggaccacagactaagct

SEQ ID NO: 4089 - RNA, 21 nt, synthetic construct
  source 1..21: mol_type = other RNA
ttcagtaacttgttacgaggt

SEQ ID NO: 4090 - RNA, 21 nt, synthetic construct
  source 1..21: mol_type = other RNA
ttcattcttactgtaatctga

SEQ ID NO: 4091 - RNA, 21 nt, synthetic construct
  source 1..21: mol_type = other RNA
ttccaagttaatgtggtctaa

SEQ ID NO: 4092 - RNA, 21 nt, synthetic construct
  source 1..21: mol_type = other RNA
ttccagaaaagtacaaaataa

SEQ ID NO: 4093 - RNA, 21 nt, synthetic construct
  source 1..21: mol_type = other RNA
ttcccacatcacaaaatttaa

SEQ ID NO: 4094 - RNA, 21 nt, synthetic construct
  source 1..21: mol_type = other RNA
ttcccagtttaaaaaactagt

SEQ ID NO: 4095 - RNA, 21 nt, synthetic construct
  source 1..21: mol_type = other RNA
ttcccccaaaattggacaatt

SEQ ID NO: 4096 - RNA, 21 nt, synthetic construct
  source 1..21: mol_type = other RNA
ttcccctaaatatgctgtgat

SEQ ID NO: 4097 - RNA, 21 nt, synthetic construct
  source 1..21: mol_type = other RNA
ttcgacagcttagtctgtggt

SEQ ID NO: 4098 - RNA, 21 nt, synthetic construct
  source 1..21: mol_type = other RNA
ttcgctgtctttaaacaaatg

SEQ ID NO: 4099 - RNA, 21 nt, synthetic construct
  source 1..21: mol_type = other RNA
ttcgtgtaggttttcaagtag

SEQ ID NO: 4100 - RNA, 21 nt, synthetic construct
  source 1..21: mol_type = other RNA
ttctaatacattcgtgtaggt

SEQ ID NO: 4101 - RNA, 21 nt, synthetic construct
  source 1..21: mol_type = other RNA
ttctacttgaaaacctacacg

SEQ ID NO: 4102 - RNA, 21 nt, synthetic construct
  source 1..21: mol_type = other RNA
ttctataatttagggactggg

SEQ ID NO: 4103 - RNA, 21 nt, synthetic construct
  source 1..21: mol_type = other RNA
ttctcaagctttctcttaagg

SEQ ID NO: 4104 - RNA, 21 nt, synthetic construct
  source 1..21: mol_type = other RNA
ttctcttaaggatttaatacc

SEQ ID NO: 4105 - RNA, 21 nt, synthetic construct
  source 1..21: mol_type = other RNA
ttctgacaagtgatactgtgg

SEQ ID NO: 4106 - RNA, 21 nt, synthetic construct
  source 1..21: mol_type = other RNA
ttctgcttcattaggtttcat

SEQ ID NO: 4107 - RNA, 21 nt, synthetic construct
  source 1..21: mol_type = other RNA
ttctggaacaaaatatttact

SEQ ID NO: 4108 - RNA, 21 nt, synthetic construct
  source 1..21: mol_type = other RNA
ttcttactggcagttttaaaa

SEQ ID NO: 4109 - RNA, 21 nt, synthetic construct
  source 1..21: mol_type = other RNA
ttcttactgtaatctgacaag

SEQ ID NO: 4110 - RNA, 21 nt, synthetic construct
  source 1..21: mol_type = other RNA
ttcttgcatgtttatcgacat

SEQ ID NO: 4111 - RNA, 21 nt, synthetic construct
  source 1..21: mol_type = other RNA
ttctttaaggttatgtgattg

SEQ ID NO: 4112 - RNA, 21 nt, synthetic construct
  source 1..21: mol_type = other RNA
ttgaaaacctacacgaatgta

SEQ ID NO: 4113 - RNA, 21 nt, synthetic construct
  source 1..21: mol_type = other RNA
ttgaaatacataatgctaagt

SEQ ID NO: 4114 - RNA, 21 nt, synthetic construct
  source 1..21: mol_type = other RNA
ttgaaattgtccaattttggg

SEQ ID NO: 4115 - RNA, 21 nt, synthetic construct
  source 1..21: mol_type = other RNA
ttgacaaaggtaggtcaccat

SEQ ID NO: 4116 - RNA, 21 nt, synthetic construct
  source 1..21: mol_type = other RNA
ttgactaaatacagaggactg

SEQ ID NO: 4117 - RNA, 21 nt, synthetic construct
  source 1..21: mol_type = other RNA
ttgactttaacatgaggtatc

SEQ ID NO: 4118 - RNA, 21 nt, synthetic construct
  source 1..21: mol_type = other RNA
ttgagaaatgtaaacggtatt

SEQ ID NO: 4119 - RNA, 21 nt, synthetic construct
  source 1..21: mol_type = other RNA
ttgattataatctagattgtg

SEQ ID NO: 4120 - RNA, 21 nt, synthetic construct
  source 1..21: mol_type = other RNA
ttgattcccacatcacaaaat

SEQ ID NO: 4121 - RNA, 21 nt, synthetic construct
  source 1..21: mol_type = other RNA
ttgattgagaaatgtaaacgg

SEQ ID NO: 4122 - RNA, 21 nt, synthetic construct
  source 1..21: mol_type = other RNA
ttgcatgtttatcgacatcac

SEQ ID NO: 4123 - RNA, 21 nt, synthetic construct
  source 1..21: mol_type = other RNA
ttgcatttgaaattgtccaat

SEQ ID NO: 4124 - RNA, 21 nt, synthetic construct
  source 1..21: mol_type = other RNA
ttgctacaaaataatttggag

SEQ ID NO: 4125 - RNA, 21 nt, synthetic construct
  source 1..21: mol_type = other RNA
ttggaatgaggttaatgttta

SEQ ID NO: 4126 - RNA, 21 nt, synthetic construct
  source 1..21: mol_type = other RNA
ttggacaatttcaaatgcaaa

SEQ ID NO: 4127 - RNA, 21 nt, synthetic construct
  source 1..21: mol_type = other RNA
ttggagtaaatgtttgatatg

SEQ ID NO: 4128 - RNA, 21 nt, synthetic construct
  source 1..21: mol_type = other RNA
ttgggcactatatcctttaac

SEQ ID NO: 4129 - RNA, 21 nt, synthetic construct
  source 1..21: mol_type = other RNA
ttgggggaagagaggagccat

SEQ ID NO: 4130 - RNA, 21 nt, synthetic construct
  source 1..21: mol_type = other RNA
ttggtattctggccctaaaaa

SEQ ID NO: 4131 - RNA, 21 nt, synthetic construct
  source 1..21: mol_type = other RNA
ttgtaaaggaatcttgtcaga

SEQ ID NO: 4132 - RNA, 21 nt, synthetic construct
  source 1..21: mol_type = other RNA
ttgtacagttcttaaatgttg

SEQ ID NO: 4133 - RNA, 21 nt, synthetic construct
  source 1..21: mol_type = other RNA
ttgtacttttctggaacaaaa

SEQ ID NO: 4134 - RNA, 21 nt, synthetic construct
  source 1..21: mol_type = other RNA
ttgtagcaaaatgaagcatca

SEQ ID NO: 4135 - RNA, 21 nt, synthetic construct
  source 1..21: mol_type = other RNA
ttgtatctaatctttagggat

SEQ ID NO: 4136 - RNA, 21 nt, synthetic construct
  source 1..21: mol_type = other RNA
ttgtattacagatttttacac

SEQ ID NO: 4137 - RNA, 21 nt, synthetic construct
  source 1..21: mol_type = other RNA
ttgtcaatacttagcattatg

SEQ ID NO: 4138 - RNA, 21 nt, synthetic construct
  source 1..21: mol_type = other RNA
ttgtcagattacagtaagaat

SEQ ID NO: 4139 - RNA, 21 nt, synthetic construct
  source 1..21: mol_type = other RNA
ttgtcaggctgtttaaacgtt

SEQ ID NO: 4140 - RNA, 21 nt, synthetic construct
  source 1..21: mol_type = other RNA
ttgtccaattttgggggaaga

SEQ ID NO: 4141 - RNA, 21 nt, synthetic construct
  source 1..21: mol_type = other RNA
ttgtgaccatctaaaattgat

SEQ ID NO: 4142 - RNA, 21 nt, synthetic construct
  source 1..21: mol_type = other RNA
ttgtgatattagctcatatga

SEQ ID NO: 4143 - RNA, 21 nt, synthetic construct
  source 1..21: mol_type = other RNA
ttgtgatgtcgataaacatgc

SEQ ID NO: 4144 - RNA, 21 nt, synthetic construct
  source 1..21: mol_type = other RNA
ttgtgatgtgggaatcaattt

SEQ ID NO: 4145 - RNA, 21 nt, synthetic construct
  source 1..21: mol_type = other RNA
ttgtggcatcgagttaaagtt

SEQ ID NO: 4146 - RNA, 21 nt, synthetic construct
  source 1..21: mol_type = other RNA
ttgttaaaactctaaacttga

SEQ ID NO: 4147 - RNA, 21 nt, synthetic construct
  source 1..21: mol_type = other RNA
ttgttaaaggatatagtgccc

SEQ ID NO: 4148 - RNA, 21 nt, synthetic construct
  source 1..21: mol_type = other RNA
ttgttacgaggtttatttcta

SEQ ID NO: 4149 - RNA, 21 nt, synthetic construct
  source 1..21: mol_type = other RNA
ttgttccagaaaagtacaaaa

SEQ ID NO: 4150 - RNA, 21 nt, synthetic construct
  source 1..21: mol_type = other RNA
ttgtttaaagacagcgaactt

SEQ ID NO: 4151 - RNA, 21 nt, synthetic construct
  source 1..21: mol_type = other RNA
ttgttttcatagtattaagtg

SEQ ID NO: 4152 - RNA, 21 nt, synthetic construct
  source 1..21: mol_type = other RNA
tttaaaaaactagtactcttg

SEQ ID NO: 4153 - RNA, 21 nt, synthetic construct
  source 1..21: mol_type = other RNA
tttaaaactgccagtaagaaa

SEQ ID NO: 4154 - RNA, 21 nt, synthetic construct
  source 1..21: mol_type = other RNA
tttaaaaggcatcatatgagc

SEQ ID NO: 4155 - RNA, 21 nt, synthetic construct
  source 1..21: mol_type = other RNA
tttaaaatttcttactggcag

SEQ ID NO: 4156 - RNA, 21 nt, synthetic construct
  source 1..21: mol_type = other RNA
tttaaacaaatggagatgact

SEQ ID NO: 4157 - RNA, 21 nt, synthetic construct
  source 1..21: mol_type = other RNA
tttaaacagcctgacaagcat

SEQ ID NO: 4158 - RNA, 21 nt, synthetic construct
  source 1..21: mol_type = other RNA
tttaaacattaacctcattcc

SEQ ID NO: 4159 - RNA, 21 nt, synthetic construct
  source 1..21: mol_type = other RNA
tttaaacgttcagtaacttgt

SEQ ID NO: 4160 - RNA, 21 nt, synthetic construct
  source 1..21: mol_type = other RNA
tttaaactgatgcttcatttt

SEQ ID NO: 4161 - RNA, 21 nt, synthetic construct
  source 1..21: mol_type = other RNA
tttaaactgggaaagttgtga

SEQ ID NO: 4162 - RNA, 21 nt, synthetic construct
  source 1..21: mol_type = other RNA
tttaaagacagcgaacttatt

SEQ ID NO: 4163 - RNA, 21 nt, synthetic construct
  source 1..21: mol_type = other RNA
tttaaattttgtgatgtggga

SEQ ID NO: 4164 - RNA, 21 nt, synthetic construct
  source 1..21: mol_type = other RNA
tttaacaaataaggtatagtg

SEQ ID NO: 4165 - RNA, 21 nt, synthetic construct
  source 1..21: mol_type = other RNA
tttaacaagagtactagtttt

SEQ ID NO: 4166 - RNA, 21 nt, synthetic construct
  source 1..21: mol_type = other RNA
tttaacatgaggtatcactat

SEQ ID NO: 4167 - RNA, 21 nt, synthetic construct
  source 1..21: mol_type = other RNA
tttaactcgatgccacaaata

SEQ ID NO: 4168 - RNA, 21 nt, synthetic construct
  source 1..21: mol_type = other RNA
tttaagaactgtacaattacc

SEQ ID NO: 4169 - RNA, 21 nt, synthetic construct
  source 1..21: mol_type = other RNA
tttaaggttatgtgattgtat

SEQ ID NO: 4170 - RNA, 21 nt, synthetic construct
  source 1..21: mol_type = other RNA
tttaataagttcacctattga

SEQ ID NO: 4171 - RNA, 21 nt, synthetic construct
  source 1..21: mol_type = other RNA
tttaataccagattattagac

SEQ ID NO: 4172 - RNA, 21 nt, synthetic construct
  source 1..21: mol_type = other RNA
tttaatatatgagttgcttcc

SEQ ID NO: 4173 - RNA, 21 nt, synthetic construct
  source 1..21: mol_type = other RNA
tttaatcttaaatagacagtg

SEQ ID NO: 4174 - RNA, 21 nt, synthetic construct
  source 1..21: mol_type = other RNA
tttaattctgcttcattaggt

SEQ ID NO: 4175 - RNA, 21 nt, synthetic construct
  source 1..21: mol_type = other RNA
tttacacatactctgtgctga

SEQ ID NO: 4176 - RNA, 21 nt, synthetic construct
  source 1..21: mol_type = other RNA
tttaccacagtatcacttgtc

SEQ ID NO: 4177 - RNA, 21 nt, synthetic construct
  source 1..21: mol_type = other RNA
tttacttaggattcacataga

SEQ ID NO: 4178 - RNA, 21 nt, synthetic construct
  source 1..21: mol_type = other RNA
tttagagttttaacaagagta

SEQ ID NO: 4179 - RNA, 21 nt, synthetic construct
  source 1..21: mol_type = other RNA
tttagatggtcacaatctaga

SEQ ID NO: 4180 - RNA, 21 nt, synthetic construct
  source 1..21: mol_type = other RNA
tttagggactgggtctttgtt

SEQ ID NO: 4181 - RNA, 21 nt, synthetic construct
  source 1..21: mol_type = other RNA
tttagggatctgttgtgatgt

SEQ ID NO: 4182 - RNA, 21 nt, synthetic construct
  source 1..21: mol_type = other RNA
tttagggatttagggatctgt

SEQ ID NO: 4183 - RNA, 21 nt, synthetic construct
  source 1..21: mol_type = other RNA
tttagggatttagggatttag

SEQ ID NO: 4184 - RNA, 21 nt, synthetic construct
  source 1..21: mol_type = other RNA
tttagggccagaataccaaaa

SEQ ID NO: 4185 - RNA, 21 nt, synthetic construct
  source 1..21: mol_type = other RNA
tttaggggaaatataaacttt

SEQ ID NO: 4186 - RNA, 21 nt, synthetic construct
  source 1..21: mol_type = other RNA
tttagtcaagtttagagtttt

SEQ ID NO: 4187 - RNA, 21 nt, synthetic construct
  source 1..21: mol_type = other RNA
tttatatttcccctaaatatg

SEQ ID NO: 4188 - RNA, 21 nt, synthetic construct
  source 1..21: mol_type = other RNA
tttatcgacatcacaacagat

SEQ ID NO: 4189 - RNA, 21 nt, synthetic construct
  source 1..21: mol_type = other RNA
tttatcttaaagtcactgtct

SEQ ID NO: 4190 - RNA, 21 nt, synthetic construct
  source 1..21: mol_type = other RNA
tttatgaaacctaatgaagca

SEQ ID NO: 4191 - RNA, 21 nt, synthetic construct
  source 1..21: mol_type = other RNA
tttatttctacttgaaaacct

SEQ ID NO: 4192 - RNA, 21 nt, synthetic construct
  source 1..21: mol_type = other RNA
tttcaaaactaaaaatcgtca

SEQ ID NO: 4193 - RNA, 21 nt, synthetic construct
  source 1..21: mol_type = other RNA
tttcaagtagaaataaacctc

SEQ ID NO: 4194 - RNA, 21 nt, synthetic construct
  source 1..21: mol_type = other RNA
tttcaggaccacagactaagc

SEQ ID NO: 4195 - RNA, 21 nt, synthetic construct
  source 1..21: mol_type = other RNA
tttcccagtttaaaaaactag

SEQ ID NO: 4196 - RNA, 21 nt, synthetic construct
  source 1..21: mol_type = other RNA
tttcccctaaatatgctgtga

SEQ ID NO: 4197 - RNA, 21 nt, synthetic construct
  source 1..21: mol_type = other RNA
tttcgacagcttagtctgtgg

SEQ ID NO: 4198 - RNA, 21 nt, synthetic construct
  source 1..21: mol_type = other RNA
tttctacttgaaaacctacac

SEQ ID NO: 4199 - RNA, 21 nt, synthetic construct
  source 1..21: mol_type = other RNA
tttctataatttagggactgg

SEQ ID NO: 4200 - RNA, 21 nt, synthetic construct
  source 1..21: mol_type = other RNA
tttctcaagctttctcttaag

SEQ ID NO: 4201 - RNA, 21 nt, synthetic construct
  source 1..21: mol_type = other RNA
tttctcttaaggatttaatac

SEQ ID NO: 4202 - RNA, 21 nt, synthetic construct
  source 1..21: mol_type = other RNA
tttctggaacaaaatatttac

SEQ ID NO: 4203 - RNA, 21 nt, synthetic construct
  source 1..21: mol_type = other RNA
tttcttactggcagttttaaa

SEQ ID NO: 4204 - RNA, 21 nt, synthetic construct
  source 1..21: mol_type = other RNA
tttgaaatacataatgctaag

SEQ ID NO: 4205 - RNA, 21 nt, synthetic construct
  source 1..21: mol_type = other RNA
tttgaaattgtccaattttgg

SEQ ID NO: 4206 - RNA, 21 nt, synthetic construct
  source 1..21: mol_type = other RNA
tttgattgagaaatgtaaacg

SEQ ID NO: 4207 - RNA, 21 nt, synthetic construct
  source 1..21: mol_type = other RNA
tttgcatttgaaattgtccaa

SEQ ID NO: 4208 - RNA, 21 nt, synthetic construct
  source 1..21: mol_type = other RNA
tttgctacaaaataatttgga

SEQ ID NO: 4209 - RNA, 21 nt, synthetic construct
  source 1..21: mol_type = other RNA
tttggagtaaatgtttgatat

SEQ ID NO: 4210 - RNA, 21 nt, synthetic construct
  source 1..21: mol_type = other RNA
tttgggggaagagaggagcca

SEQ ID NO: 4211 - RNA, 21 nt, synthetic construct
  source 1..21: mol_type = other RNA
tttggtattctggccctaaaa

SEQ ID NO: 4212 - RNA, 21 nt, synthetic construct
  source 1..21: mol_type = other RNA
tttgtacttttctggaacaaa

SEQ ID NO: 4213 - RNA, 21 nt, synthetic construct
  source 1..21: mol_type = other RNA
tttgtagcaaaatgaagcatc

SEQ ID NO: 4214 - RNA, 21 nt, synthetic construct
  source 1..21: mol_type = other RNA
tttgtatctaatctttaggga

SEQ ID NO: 4215 - RNA, 21 nt, synthetic construct
  source 1..21: mol_type = other RNA
tttgtcaatacttagcattat

SEQ ID NO: 4216 - RNA, 21 nt, synthetic construct
  source 1..21: mol_type = other RNA
tttgtgatgtgggaatcaatt

SEQ ID NO: 4217 - RNA, 21 nt, synthetic construct
  source 1..21: mol_type = other RNA
tttgtggcatcgagttaaagt

SEQ ID NO: 4218 - RNA, 21 nt, synthetic construct
  source 1..21: mol_type = other RNA
tttgttaaaggatatagtgcc

SEQ ID NO: 4219 - RNA, 21 nt, synthetic construct
  source 1..21: mol_type = other RNA
tttgttccagaaaagtacaaa

SEQ ID NO: 4220 - RNA, 21 nt, synthetic construct
  source 1..21: mol_type = other RNA
tttgtttaaagacagcgaact

SEQ ID NO: 4221 - RNA, 21 nt, synthetic construct
  source 1..21: mol_type = other RNA
ttttaaaactgccagtaagaa

SEQ ID NO: 4222 - RNA, 21 nt, synthetic construct
  source 1..21: mol_type = other RNA
ttttaaaaggcatcatatgag

SEQ ID NO: 4223 - RNA, 21 nt, synthetic construct
  source 1..21: mol_type = other RNA
ttttaaactgatgcttcattt

SEQ ID NO: 4224 - RNA, 21 nt, synthetic construct
  source 1..21: mol_type = other RNA
ttttaaactgggaaagttgtg

SEQ ID NO: 4225 - RNA, 21 nt, synthetic construct
  source 1..21: mol_type = other RNA
ttttaaattttgtgatgtggg

SEQ ID NO: 4226 - RNA, 21 nt, synthetic construct
  source 1..21: mol_type = other RNA
ttttaacaagagtactagttt

SEQ ID NO: 4227 - RNA, 21 nt, synthetic construct
  source 1..21: mol_type = other RNA
ttttacacatactctgtgctg

SEQ ID NO: 4228 - RNA, 21 nt, synthetic construct
  source 1..21: mol_type = other RNA
ttttaccacagtatcacttgt

SEQ ID NO: 4229 - RNA, 21 nt, synthetic construct
  source 1..21: mol_type = other RNA
ttttagatggtcacaatctag

SEQ ID NO: 4230 - RNA, 21 nt, synthetic construct
  source 1..21: mol_type = other RNA
ttttagggccagaataccaaa

SEQ ID NO: 4231 - RNA, 21 nt, synthetic construct
  source 1..21: mol_type = other RNA
ttttatcttaaagtcactgtc

SEQ ID NO: 4232 - RNA, 21 nt, synthetic construct
  source 1..21: mol_type = other RNA
ttttcaagtagaaataaacct

SEQ ID NO: 4233 - RNA, 21 nt, synthetic construct
  source 1..21: mol_type = other RNA
ttttcaggaccacagactaag

SEQ ID NO: 4234 - RNA, 21 nt, synthetic construct
  source 1..21: mol_type = other RNA
ttttgattgagaaatgtaaac

SEQ ID NO: 4235 - RNA, 21 nt, synthetic construct
  source 1..21: mol_type = other RNA
ttttgcatttgaaattgtcca

SEQ ID NO: 4236 - RNA, 21 nt, synthetic construct
  source 1..21: mol_type = other RNA
ttttgctacaaaataatttgg

SEQ ID NO: 4237 - RNA, 21 nt, synthetic construct
  source 1..21: mol_type = other RNA
ttttgggggaagagaggagcc

SEQ ID NO: 4238 - RNA, 21 nt, synthetic construct
  source 1..21: mol_type = other RNA
ttttggtattctggccctaaa

SEQ ID NO: 4239 - RNA, 21 nt, synthetic construct
  source 1..21: mol_type = other RNA
ttttgtacttttctggaacaa

SEQ ID NO: 4240 - RNA, 21 nt, synthetic construct
  source 1..21: mol_type = other RNA
ttttgtagcaaaatgaagcat

SEQ ID NO: 4241 - RNA, 21 nt, synthetic construct
  source 1..21: mol_type = other RNA
ttttgtgatgtgggaatcaat

SEQ ID NO: 4242 - RNA, 21 nt, synthetic construct
  source 1..21: mol_type = other RNA
ttttgttccagaaaagtacaa

SEQ ID NO: 4243 - RNA, 21 nt, synthetic construct
  source 1..21: mol_type = other RNA
tttttaaaactgccagtaaga

SEQ ID NO: 4244 - RNA, 21 nt, synthetic construct
  source 1..21: mol_type = other RNA
tttttaaactgatgcttcatt

SEQ ID NO: 4245 - RNA, 21 nt, synthetic construct
  source 1..21: mol_type = other RNA
tttttaaactgggaaagttgt

SEQ ID NO: 4246 - RNA, 21 nt, synthetic construct
  source 1..21: mol_type = other RNA
tttttacacatactctgtgct

SEQ ID NO: 4247 - RNA, 21 nt, synthetic construct
  source 1..21: mol_type = other RNA
tttttaccacagtatcacttg

SEQ ID NO: 4248 - RNA, 21 nt, synthetic construct
  source 1..21: mol_type = other RNA
tttttagggccagaataccaa

SEQ ID NO: 4249 - RNA, 21 nt, synthetic construct
  source 1..21: mol_type = other RNA
tttttatcttaaagtcactgt

SEQ ID NO: 4250 - RNA, 21 nt, synthetic construct
  source 1..21: mol_type = other RNA
ttttttaaaactgccagtaag

SEQ ID NO: 4251 - RNA, 21 nt, synthetic construct
  source 1..21: mol_type = other RNA
ttttttaaactgggaaagttg

SEQ ID NO: 4252 - RNA, 21 nt, synthetic construct
  source 1..21: mol_type = other RNA
ttttttaccacagtatcactt

SEQ ID NO: 4253 - RNA, 21 nt, synthetic construct
  source 1..21: mol_type = other RNA
ttttttagggccagaatacca

SEQ ID NO: 4254 - RNA, 21 nt, synthetic construct
  source 1..21: mol_type = other RNA
ttttttatcttaaagtcactg

SEQ ID NO: 4255 - RNA, 22 nt, synthetic construct
  source 1..22: mol_type = other RNA
aaaaaactagtactcttgttaa

SEQ ID NO: 4256 - RNA, 22 nt, synthetic construct
  source 1..22: mol_type = other RNA
aaaaaatcagcgttaatttcga

SEQ ID NO: 4257 - RNA, 22 nt, synthetic construct
  source 1..22: mol_type = other RNA
aaaaaatctatttctcaagctt

SEQ ID NO: 4258 - RNA, 22 nt, synthetic construct
  source 1..22: mol_type = other RNA
aaaaactagtactcttgttaaa

SEQ ID NO: 4259 - RNA, 22 nt, synthetic construct
  source 1..22: mol_type = other RNA
aaaaataaattctgacaagtga

SEQ ID NO: 4260 - RNA, 22 nt, synthetic construct
  source 1..22: mol_type = other RNA
aaaaatcagcgttaatttcgac

SEQ ID NO: 4261 - RNA, 22 nt, synthetic construct
  source 1..22: mol_type = other RNA
aaaaatcgtcagcacagagtat

SEQ ID NO: 4262 - RNA, 22 nt, synthetic construct
  source 1..22: mol_type = other RNA
aaaaatctatttctcaagcttt

SEQ ID NO: 4263 - RNA, 22 nt, synthetic construct
  source 1..22: mol_type = other RNA
aaaacctacacgaatgtattag

SEQ ID NO: 4264 - RNA, 22 nt, synthetic construct
  source 1..22: mol_type = other RNA
aaaactaaaaatcgtcagcaca

SEQ ID NO: 4265 - RNA, 22 nt, synthetic construct
  source 1..22: mol_type = other RNA
aaaactagtactcttgttaaaa

SEQ ID NO: 4266 - RNA, 22 nt, synthetic construct
  source 1..22: mol_type = other RNA
aaaactctaaacttgactaaat

SEQ ID NO: 4267 - RNA, 22 nt, synthetic construct
  source 1..22: mol_type = other RNA
aaaactgccagtaagaaatttt

SEQ ID NO: 4268 - RNA, 22 nt, synthetic construct
  source 1..22: mol_type = other RNA
aaaagatatgtatgatctatgt

SEQ ID NO: 4269 - RNA, 22 nt, synthetic construct
  source 1..22: mol_type = other RNA
aaaaggcatcatatgagctaat

SEQ ID NO: 4270 - RNA, 22 nt, synthetic construct
  source 1..22: mol_type = other RNA
aaaataaattctgacaagtgat

SEQ ID NO: 4271 - RNA, 22 nt, synthetic construct
  source 1..22: mol_type = other RNA
aaaataagttcgctgtctttaa

SEQ ID NO: 4272 - RNA, 22 nt, synthetic construct
  source 1..22: mol_type = other RNA
aaaatatttacttaggattcac

SEQ ID NO: 4273 - RNA, 22 nt, synthetic construct
  source 1..22: mol_type = other RNA
aaaatcagcgttaatttcgaca

SEQ ID NO: 4274 - RNA, 22 nt, synthetic construct
  source 1..22: mol_type = other RNA
aaaatcgtcagcacagagtatg

SEQ ID NO: 4275 - RNA, 22 nt, synthetic construct
  source 1..22: mol_type = other RNA
aaaatctatttctcaagctttc

SEQ ID NO: 4276 - RNA, 22 nt, synthetic construct
  source 1..22: mol_type = other RNA
aaaatgaagcatcagtttaaaa

SEQ ID NO: 4277 - RNA, 22 nt, synthetic construct
  source 1..22: mol_type = other RNA
aaaatggctcctctcttccccc

SEQ ID NO: 4278 - RNA, 22 nt, synthetic construct
  source 1..22: mol_type = other RNA
aaaattcaataaacaaagaccc

SEQ ID NO: 4279 - RNA, 22 nt, synthetic construct
  source 1..22: mol_type = other RNA
aaaattgattcccacatcacaa

SEQ ID NO: 4280 - RNA, 22 nt, synthetic construct
  source 1..22: mol_type = other RNA
aaaattggacaatttcaaatgc

SEQ ID NO: 4281 - RNA, 22 nt, synthetic construct
  source 1..22: mol_type = other RNA
aaaatttcttactggcagtttt

SEQ ID NO: 4282 - RNA, 22 nt, synthetic construct
  source 1..22: mol_type = other RNA
aaacaaagacccagtccctaaa

SEQ ID NO: 4283 - RNA, 22 nt, synthetic construct
  source 1..22: mol_type = other RNA
aaacaaatggagatgactacta

SEQ ID NO: 4284 - RNA, 22 nt, synthetic construct
  source 1..22: mol_type = other RNA
aaacagcctgacaagcatgtat

SEQ ID NO: 4285 - RNA, 22 nt, synthetic construct
  source 1..22: mol_type = other RNA
aaacatacaatcacataacctt

SEQ ID NO: 4286 - RNA, 22 nt, synthetic construct
  source 1..22: mol_type = other RNA
aaacatatatacatgcttgtca

SEQ ID NO: 4287 - RNA, 22 nt, synthetic construct
  source 1..22: mol_type = other RNA
aaacattaacctcattccaagt

SEQ ID NO: 4288 - RNA, 22 nt, synthetic construct
  source 1..22: mol_type = other RNA
aaaccaaatagaggaagcaact

SEQ ID NO: 4289 - RNA, 22 nt, synthetic construct
  source 1..22: mol_type = other RNA
aaacccatttgttaaaggatat

SEQ ID NO: 4290 - RNA, 22 nt, synthetic construct
  source 1..22: mol_type = other RNA
aaacctaatgaagcagaattaa

SEQ ID NO: 4291 - RNA, 22 nt, synthetic construct
  source 1..22: mol_type = other RNA
aaacctacacgaatgtattaga

SEQ ID NO: 4292 - RNA, 22 nt, synthetic construct
  source 1..22: mol_type = other RNA
aaacctcgtaacaagttactga

SEQ ID NO: 4293 - RNA, 22 nt, synthetic construct
  source 1..22: mol_type = other RNA
aaacggtattctttaaggttat

SEQ ID NO: 4294 - RNA, 22 nt, synthetic construct
  source 1..22: mol_type = other RNA
aaacgttcagtaacttgttacg

SEQ ID NO: 4295 - RNA, 22 nt, synthetic construct
  source 1..22: mol_type = other RNA
aaactaaaaatcgtcagcacag

SEQ ID NO: 4296 - RNA, 22 nt, synthetic construct
  source 1..22: mol_type = other RNA
aaactagtactcttgttaaaac

SEQ ID NO: 4297 - RNA, 22 nt, synthetic construct
  source 1..22: mol_type = other RNA
aaactctaaacttgactaaata

SEQ ID NO: 4298 - RNA, 22 nt, synthetic construct
  source 1..22: mol_type = other RNA
aaactgatgcttcattttgcta

SEQ ID NO: 4299 - RNA, 22 nt, synthetic construct
  source 1..22: mol_type = other RNA
aaactgccagtaagaaatttta

SEQ ID NO: 4300 - RNA, 22 nt, synthetic construct
  source 1..22: mol_type = other RNA
aaactgggaaagttgtgatatt

SEQ ID NO: 4301 - RNA, 22 nt, synthetic construct
  source 1..22: mol_type = other RNA
aaacttgactaaatacagagga

SEQ ID NO: 4302 - RNA, 22 nt, synthetic construct
  source 1..22: mol_type = other RNA
aaactttaactcgatgccacaa

SEQ ID NO: 4303 - RNA, 22 nt, synthetic construct
  source 1..22: mol_type = other RNA
aaagaataccgtttacatttct

SEQ ID NO: 4304 - RNA, 22 nt, synthetic construct
  source 1..22: mol_type = other RNA
aaagacagcgaacttattttaa

SEQ ID NO: 4305 - RNA, 22 nt, synthetic construct
  source 1..22: mol_type = other RNA
aaagacccagtccctaaattat

SEQ ID NO: 4306 - RNA, 22 nt, synthetic construct
  source 1..22: mol_type = other RNA
aaagatatgtatgatctatgtg

SEQ ID NO: 4307 - RNA, 22 nt, synthetic construct
  source 1..22: mol_type = other RNA
aaagcttgagaaatagattttt

SEQ ID NO: 4308 - RNA, 22 nt, synthetic construct
  source 1..22: mol_type = other RNA
aaaggaatcttgtcagattaca

SEQ ID NO: 4309 - RNA, 22 nt, synthetic construct
  source 1..22: mol_type = other RNA
aaaggatatagtgcccaagtta

SEQ ID NO: 4310 - RNA, 22 nt, synthetic construct
  source 1..22: mol_type = other RNA
aaaggcatcatatgagctaata

SEQ ID NO: 4311 - RNA, 22 nt, synthetic construct
  source 1..22: mol_type = other RNA
aaaggtaggtcaccatataact

SEQ ID NO: 4312 - RNA, 22 nt, synthetic construct
  source 1..22: mol_type = other RNA
aaagtcaatgtgacttagtagt

SEQ ID NO: 4313 - RNA, 22 nt, synthetic construct
  source 1..22: mol_type = other RNA
aaagtcactgtctatttaagat

SEQ ID NO: 4314 - RNA, 22 nt, synthetic construct
  source 1..22: mol_type = other RNA
aaagttatttaataagttcacc

SEQ ID NO: 4315 - RNA, 22 nt, synthetic construct
  source 1..22: mol_type = other RNA
aaagttgtgatattagctcata

SEQ ID NO: 4316 - RNA, 22 nt, synthetic construct
  source 1..22: mol_type = other RNA
aaagtttatatttcccctaaat

SEQ ID NO: 4317 - RNA, 22 nt, synthetic construct
  source 1..22: mol_type = other RNA
aaataaacctcgtaacaagtta

SEQ ID NO: 4318 - RNA, 22 nt, synthetic construct
  source 1..22: mol_type = other RNA
aaataaattctgacaagtgata

SEQ ID NO: 4319 - RNA, 22 nt, synthetic construct
  source 1..22: mol_type = other RNA
aaataaggtatagtgatacctc

SEQ ID NO: 4320 - RNA, 22 nt, synthetic construct
  source 1..22: mol_type = other RNA
aaataagttcgctgtctttaaa

SEQ ID NO: 4321 - RNA, 22 nt, synthetic construct
  source 1..22: mol_type = other RNA
aaataattgtaaaggaatcttg

SEQ ID NO: 4322 - RNA, 22 nt, synthetic construct
  source 1..22: mol_type = other RNA
aaatacagaggactggtaattg

SEQ ID NO: 4323 - RNA, 22 nt, synthetic construct
  source 1..22: mol_type = other RNA
aaatacataatgctaagtattg

SEQ ID NO: 4324 - RNA, 22 nt, synthetic construct
  source 1..22: mol_type = other RNA
aaatagacagtgactttaagat

SEQ ID NO: 4325 - RNA, 22 nt, synthetic construct
  source 1..22: mol_type = other RNA
aaatagaggaagcaactcatat

SEQ ID NO: 4326 - RNA, 22 nt, synthetic construct
  source 1..22: mol_type = other RNA
aaatataaactttaactcgatg

SEQ ID NO: 4327 - RNA, 22 nt, synthetic construct
  source 1..22: mol_type = other RNA
aaatatgctgtgattctaatac

SEQ ID NO: 4328 - RNA, 22 nt, synthetic construct
  source 1..22: mol_type = other RNA
aaatatgttcattcttactgta

SEQ ID NO: 4329 - RNA, 22 nt, synthetic construct
  source 1..22: mol_type = other RNA
aaatatttacttaggattcaca

SEQ ID NO: 4330 - RNA, 22 nt, synthetic construct
  source 1..22: mol_type = other RNA
aaatattttgttccagaaaagt

SEQ ID NO: 4331 - RNA, 22 nt, synthetic construct
  source 1..22: mol_type = other RNA
aaatcagcgttaatttcgacag

SEQ ID NO: 4332 - RNA, 22 nt, synthetic construct
  source 1..22: mol_type = other RNA
aaatcatatcaaacatttactc

SEQ ID NO: 4333 - RNA, 22 nt, synthetic construct
  source 1..22: mol_type = other RNA
aaatccctaaagattagataca

SEQ ID NO: 4334 - RNA, 22 nt, synthetic construct
  source 1..22: mol_type = other RNA
aaatccctaaatccctaaagat

SEQ ID NO: 4335 - RNA, 22 nt, synthetic construct
  source 1..22: mol_type = other RNA
aaatccttaagagaaagcttga

SEQ ID NO: 4336 - RNA, 22 nt, synthetic construct
  source 1..22: mol_type = other RNA
aaatcgtcagcacagagtatgt

SEQ ID NO: 4337 - RNA, 22 nt, synthetic construct
  source 1..22: mol_type = other RNA
aaatctatttctcaagctttct

SEQ ID NO: 4338 - RNA, 22 nt, synthetic construct
  source 1..22: mol_type = other RNA
aaatgaagcatcagtttaaaaa

SEQ ID NO: 4339 - RNA, 22 nt, synthetic construct
  source 1..22: mol_type = other RNA
aaatggagatgactactaagtc

SEQ ID NO: 4340 - RNA, 22 nt, synthetic construct
  source 1..22: mol_type = other RNA
aaatggctcctctcttccccca

SEQ ID NO: 4341 - RNA, 22 nt, synthetic construct
  source 1..22: mol_type = other RNA
aaatgtaaacggtattctttaa

SEQ ID NO: 4342 - RNA, 22 nt, synthetic construct
  source 1..22: mol_type = other RNA
aaattaaacccatttgttaaag

SEQ ID NO: 4343 - RNA, 22 nt, synthetic construct
  source 1..22: mol_type = other RNA
aaattatccaatatacatgtca

SEQ ID NO: 4344 - RNA, 22 nt, synthetic construct
  source 1..22: mol_type = other RNA
aaattattcttgcatgtttatc

SEQ ID NO: 4345 - RNA, 22 nt, synthetic construct
  source 1..22: mol_type = other RNA
aaattcaataaacaaagaccca

SEQ ID NO: 4346 - RNA, 22 nt, synthetic construct
  source 1..22: mol_type = other RNA
aaattctgacaagtgatactgt

SEQ ID NO: 4347 - RNA, 22 nt, synthetic construct
  source 1..22: mol_type = other RNA
aaattgattcccacatcacaaa

SEQ ID NO: 4348 - RNA, 22 nt, synthetic construct
  source 1..22: mol_type = other RNA
aaattggacaatttcaaatgca

SEQ ID NO: 4349 - RNA, 22 nt, synthetic construct
  source 1..22: mol_type = other RNA
aaattgtccaattttgggggaa

SEQ ID NO: 4350 - RNA, 22 nt, synthetic construct
  source 1..22: mol_type = other RNA
aaatttctataatttagggact

SEQ ID NO: 4351 - RNA, 22 nt, synthetic construct
  source 1..22: mol_type = other RNA
aaatttcttactggcagtttta

SEQ ID NO: 4352 - RNA, 22 nt, synthetic construct
  source 1..22: mol_type = other RNA
aaatttgtatctaatctttagg

SEQ ID NO: 4353 - RNA, 22 nt, synthetic construct
  source 1..22: mol_type = other RNA
aaattttgtgatgtgggaatca

SEQ ID NO: 4354 - RNA, 22 nt, synthetic construct
  source 1..22: mol_type = other RNA
aaatttttaaactgatgcttca

SEQ ID NO: 4355 - RNA, 22 nt, synthetic construct
  source 1..22: mol_type = other RNA
aaattttttaccacagtatcac

SEQ ID NO: 4356 - RNA, 22 nt, synthetic construct
  source 1..22: mol_type = other RNA
aacaaagacccagtccctaaat

SEQ ID NO: 4357 - RNA, 22 nt, synthetic construct
  source 1..22: mol_type = other RNA
aacaaataaggtatagtgatac

SEQ ID NO: 4358 - RNA, 22 nt, synthetic construct
  source 1..22: mol_type = other RNA
aacaaataattgtaaaggaatc

SEQ ID NO: 4359 - RNA, 22 nt, synthetic construct
  source 1..22: mol_type = other RNA
aacaaatggagatgactactaa

SEQ ID NO: 4360 - RNA, 22 nt, synthetic construct
  source 1..22: mol_type = other RNA
aacaagagtactagttttttaa

SEQ ID NO: 4361 - RNA, 22 nt, synthetic construct
  source 1..22: mol_type = other RNA
aacaagttactgaacgtttaaa

SEQ ID NO: 4362 - RNA, 22 nt, synthetic construct
  source 1..22: mol_type = other RNA
aacacttaatactatgaaaaca

SEQ ID NO: 4363 - RNA, 22 nt, synthetic construct
  source 1..22: mol_type = other RNA
aacagatccctaaatccctaaa

SEQ ID NO: 4364 - RNA, 22 nt, synthetic construct
  source 1..22: mol_type = other RNA
aacagcctgacaagcatgtata

SEQ ID NO: 4365 - RNA, 22 nt, synthetic construct
  source 1..22: mol_type = other RNA
aacatacaatcacataacctta

SEQ ID NO: 4366 - RNA, 22 nt, synthetic construct
  source 1..22: mol_type = other RNA
aacatatatacatgcttgtcag

SEQ ID NO: 4367 - RNA, 22 nt, synthetic construct
  source 1..22: mol_type = other RNA
aacatatttgtggcatcgagtt

SEQ ID NO: 4368 - RNA, 22 nt, synthetic construct
  source 1..22: mol_type = other RNA
aacatgaggtatcactatacct

SEQ ID NO: 4369 - RNA, 22 nt, synthetic construct
  source 1..22: mol_type = other RNA
aacattaacctcattccaagtt

SEQ ID NO: 4370 - RNA, 22 nt, synthetic construct
  source 1..22: mol_type = other RNA
aacatttaagaactgtacaatt

SEQ ID NO: 4371 - RNA, 22 nt, synthetic construct
  source 1..22: mol_type = other RNA
aaccaaatagaggaagcaactc

SEQ ID NO: 4372 - RNA, 22 nt, synthetic construct
  source 1..22: mol_type = other RNA
aacccatttgttaaaggatata

SEQ ID NO: 4373 - RNA, 22 nt, synthetic construct
  source 1..22: mol_type = other RNA
aacctaatgaagcagaattaaa

SEQ ID NO: 4374 - RNA, 22 nt, synthetic construct
  source 1..22: mol_type = other RNA
aacctacacgaatgtattagaa

SEQ ID NO: 4375 - RNA, 22 nt, synthetic construct
  source 1..22: mol_type = other RNA
aacctcattccaagttaatgtg

SEQ ID NO: 4376 - RNA, 22 nt, synthetic construct
  source 1..22: mol_type = other RNA
aacctcgtaacaagttactgaa

SEQ ID NO: 4377 - RNA, 22 nt, synthetic construct
  source 1..22: mol_type = other RNA
aaccttaaagaataccgtttac

SEQ ID NO: 4378 - RNA, 22 nt, synthetic construct
  source 1..22: mol_type = other RNA
aacggtattctttaaggttatg

SEQ ID NO: 4379 - RNA, 22 nt, synthetic construct
  source 1..22: mol_type = other RNA
aacgttcagtaacttgttacga

SEQ ID NO: 4380 - RNA, 22 nt, synthetic construct
  source 1..22: mol_type = other RNA
aacgtttaaacagcctgacaag

SEQ ID NO: 4381 - RNA, 22 nt, synthetic construct
  source 1..22: mol_type = other RNA
aactaaaaatcgtcagcacaga

SEQ ID NO: 4382 - RNA, 22 nt, synthetic construct
  source 1..22: mol_type = other RNA
aactagtactcttgttaaaact

SEQ ID NO: 4383 - RNA, 22 nt, synthetic construct
  source 1..22: mol_type = other RNA
aactcgatgccacaaatatgtt

SEQ ID NO: 4384 - RNA, 22 nt, synthetic construct
  source 1..22: mol_type = other RNA
aactctaaacttgactaaatac

SEQ ID NO: 4385 - RNA, 22 nt, synthetic construct
  source 1..22: mol_type = other RNA
aactgaggcaaatttaaaaggc

SEQ ID NO: 4386 - RNA, 22 nt, synthetic construct
  source 1..22: mol_type = other RNA
aactgatgcttcattttgctac

SEQ ID NO: 4387 - RNA, 22 nt, synthetic construct
  source 1..22: mol_type = other RNA
aactgccagtaagaaattttaa

SEQ ID NO: 4388 - RNA, 22 nt, synthetic construct
  source 1..22: mol_type = other RNA
aactgggaaagttgtgatatta

SEQ ID NO: 4389 - RNA, 22 nt, synthetic construct
  source 1..22: mol_type = other RNA
aactgtacaattaccagtcctc

SEQ ID NO: 4390 - RNA, 22 nt, synthetic construct
  source 1..22: mol_type = other RNA
aacttgactaaatacagaggac

SEQ ID NO: 4391 - RNA, 22 nt, synthetic construct
  source 1..22: mol_type = other RNA
aacttggaatgaggttaatgtt

SEQ ID NO: 4392 - RNA, 22 nt, synthetic construct
  source 1..22: mol_type = other RNA
aacttgggcactatatccttta

SEQ ID NO: 4393 - RNA, 22 nt, synthetic construct
  source 1..22: mol_type = other RNA
aacttgttacgaggtttatttc

SEQ ID NO: 4394 - RNA, 22 nt, synthetic construct
  source 1..22: mol_type = other RNA
aactttaactcgatgccacaaa

SEQ ID NO: 4395 - RNA, 22 nt, synthetic construct
  source 1..22: mol_type = other RNA
aactttcccagtttaaaaaact

SEQ ID NO: 4396 - RNA, 22 nt, synthetic construct
  source 1..22: mol_type = other RNA
aagaactgtacaattaccagtc

SEQ ID NO: 4397 - RNA, 22 nt, synthetic construct
  source 1..22: mol_type = other RNA
aagaataccgtttacatttctc

SEQ ID NO: 4398 - RNA, 22 nt, synthetic construct
  source 1..22: mol_type = other RNA
aagaatgaacatatttgtggca

SEQ ID NO: 4399 - RNA, 22 nt, synthetic construct
  source 1..22: mol_type = other RNA
aagaattttgattgagaaatgt

SEQ ID NO: 4400 - RNA, 22 nt, synthetic construct
  source 1..22: mol_type = other RNA
aagacagcgaacttattttaat

SEQ ID NO: 4401 - RNA, 22 nt, synthetic construct
  source 1..22: mol_type = other RNA
aagacccagtccctaaattata

SEQ ID NO: 4402 - RNA, 22 nt, synthetic construct
  source 1..22: mol_type = other RNA
aagagaaagcttgagaaataga

SEQ ID NO: 4403 - RNA, 22 nt, synthetic construct
  source 1..22: mol_type = other RNA
aagagaggagccattttggtat

SEQ ID NO: 4404 - RNA, 22 nt, synthetic construct
  source 1..22: mol_type = other RNA
aagagtactagttttttaaact

SEQ ID NO: 4405 - RNA, 22 nt, synthetic construct
  source 1..22: mol_type = other RNA
aagatatgtatgatctatgtga

SEQ ID NO: 4406 - RNA, 22 nt, synthetic construct
  source 1..22: mol_type = other RNA
aagattaaacatacaatcacat

SEQ ID NO: 4407 - RNA, 22 nt, synthetic construct
  source 1..22: mol_type = other RNA
aagattcctttacaattatttg

SEQ ID NO: 4408 - RNA, 22 nt, synthetic construct
  source 1..22: mol_type = other RNA
aagcagaattaaatactgtatt

SEQ ID NO: 4409 - RNA, 22 nt, synthetic construct
  source 1..22: mol_type = other RNA
aagcatcagtttaaaaatttgt

SEQ ID NO: 4410 - RNA, 22 nt, synthetic construct
  source 1..22: mol_type = other RNA
aagctgtcgaaattaacgctga

SEQ ID NO: 4411 - RNA, 22 nt, synthetic construct
  source 1..22: mol_type = other RNA
aagcttgagaaatagatttttt

SEQ ID NO: 4412 - RNA, 22 nt, synthetic construct
  source 1..22: mol_type = other RNA
aagctttctcttaaggatttaa

SEQ ID NO: 4413 - RNA, 22 nt, synthetic construct
  source 1..22: mol_type = other RNA
aaggaatcttgtcagattacag

SEQ ID NO: 4414 - RNA, 22 nt, synthetic construct
  source 1..22: mol_type = other RNA
aaggatatagtgcccaagttat

SEQ ID NO: 4415 - RNA, 22 nt, synthetic construct
  source 1..22: mol_type = other RNA
aaggatttaataccagattatt

SEQ ID NO: 4416 - RNA, 22 nt, synthetic construct
  source 1..22: mol_type = other RNA
aaggcatcatatgagctaatat

SEQ ID NO: 4417 - RNA, 22 nt, synthetic construct
  source 1..22: mol_type = other RNA
aaggtaggtcaccatataactt

SEQ ID NO: 4418 - RNA, 22 nt, synthetic construct
  source 1..22: mol_type = other RNA
aaggtatagtgatacctcatgt

SEQ ID NO: 4419 - RNA, 22 nt, synthetic construct
  source 1..22: mol_type = other RNA
aaggttatgtgattgtatgttt

SEQ ID NO: 4420 - RNA, 22 nt, synthetic construct
  source 1..22: mol_type = other RNA
aagtaaatattttgttccagaa

SEQ ID NO: 4421 - RNA, 22 nt, synthetic construct
  source 1..22: mol_type = other RNA
aagtagaaataaacctcgtaac

SEQ ID NO: 4422 - RNA, 22 nt, synthetic construct
  source 1..22: mol_type = other RNA
aagtattgacaaaggtaggtca

SEQ ID NO: 4423 - RNA, 22 nt, synthetic construct
  source 1..22: mol_type = other RNA
aagtcaatgtgacttagtagtc

SEQ ID NO: 4424 - RNA, 22 nt, synthetic construct
  source 1..22: mol_type = other RNA
aagtcacattgactttaacatg

SEQ ID NO: 4425 - RNA, 22 nt, synthetic construct
  source 1..22: mol_type = other RNA
aagtcactgtctatttaagatt

SEQ ID NO: 4426 - RNA, 22 nt, synthetic construct
  source 1..22: mol_type = other RNA
aagtgatactgtggtaaaaaat

SEQ ID NO: 4427 - RNA, 22 nt, synthetic construct
  source 1..22: mol_type = other RNA
aagttaatgtggtctaataatc

SEQ ID NO: 4428 - RNA, 22 nt, synthetic construct
  source 1..22: mol_type = other RNA
aagttactgaacgtttaaacag

SEQ ID NO: 4429 - RNA, 22 nt, synthetic construct
  source 1..22: mol_type = other RNA
aagttatatggtgacctacctt

SEQ ID NO: 4430 - RNA, 22 nt, synthetic construct
  source 1..22: mol_type = other RNA
aagttatttaataagttcacct

SEQ ID NO: 4431 - RNA, 22 nt, synthetic construct
  source 1..22: mol_type = other RNA
aagttcacctattgattataat

SEQ ID NO: 4432 - RNA, 22 nt, synthetic construct
  source 1..22: mol_type = other RNA
aagttcgctgtctttaaacaaa

SEQ ID NO: 4433 - RNA, 22 nt, synthetic construct
  source 1..22: mol_type = other RNA
aagttgtgatattagctcatat

SEQ ID NO: 4434 - RNA, 22 nt, synthetic construct
  source 1..22: mol_type = other RNA
aagtttagagttttaacaagag

SEQ ID NO: 4435 - RNA, 22 nt, synthetic construct
  source 1..22: mol_type = other RNA
aagtttatatttcccctaaata

SEQ ID NO: 4436 - RNA, 22 nt, synthetic construct
  source 1..22: mol_type = other RNA
aataaacaaagacccagtccct

SEQ ID NO: 4437 - RNA, 22 nt, synthetic construct
  source 1..22: mol_type = other RNA
aataaacctcgtaacaagttac

SEQ ID NO: 4438 - RNA, 22 nt, synthetic construct
  source 1..22: mol_type = other RNA
aataaattctgacaagtgatac

SEQ ID NO: 4439 - RNA, 22 nt, synthetic construct
  source 1..22: mol_type = other RNA
aataaggtatagtgatacctca

SEQ ID NO: 4440 - RNA, 22 nt, synthetic construct
  source 1..22: mol_type = other RNA
aataagttcacctattgattat

SEQ ID NO: 4441 - RNA, 22 nt, synthetic construct
  source 1..22: mol_type = other RNA
aataagttcgctgtctttaaac

SEQ ID NO: 4442 - RNA, 22 nt, synthetic construct
  source 1..22: mol_type = other RNA
aataatctataattttcaggac

SEQ ID NO: 4443 - RNA, 22 nt, synthetic construct
  source 1..22: mol_type = other RNA
aataatctggtattaaatcctt

SEQ ID NO: 4444 - RNA, 22 nt, synthetic construct
  source 1..22: mol_type = other RNA
aataattgtaaaggaatcttgt

SEQ ID NO: 4445 - RNA, 22 nt, synthetic construct
  source 1..22: mol_type = other RNA
aataatttggagtaaatgtttg

SEQ ID NO: 4446 - RNA, 22 nt, synthetic construct
  source 1..22: mol_type = other RNA
aatacagaggactggtaattgt

SEQ ID NO: 4447 - RNA, 22 nt, synthetic construct
  source 1..22: mol_type = other RNA
aatacagtatttaattctgctt

SEQ ID NO: 4448 - RNA, 22 nt, synthetic construct
  source 1..22: mol_type = other RNA
aatacataatgctaagtattga

SEQ ID NO: 4449 - RNA, 22 nt, synthetic construct
  source 1..22: mol_type = other RNA
aatacattcgtgtaggttttca

SEQ ID NO: 4450 - RNA, 22 nt, synthetic construct
  source 1..22: mol_type = other RNA
aataccaaaatggctcctctct

SEQ ID NO: 4451 - RNA, 22 nt, synthetic construct
  source 1..22: mol_type = other RNA
aataccagattattagaccaca

SEQ ID NO: 4452 - RNA, 22 nt, synthetic construct
  source 1..22: mol_type = other RNA
aataccgtttacatttctcaat

SEQ ID NO: 4453 - RNA, 22 nt, synthetic construct
  source 1..22: mol_type = other RNA
aatactacaacatttaagaact

SEQ ID NO: 4454 - RNA, 22 nt, synthetic construct
  source 1..22: mol_type = other RNA
aatacttagcattatgtatttc

SEQ ID NO: 4455 - RNA, 22 nt, synthetic construct
  source 1..22: mol_type = other RNA
aatagacagtgactttaagata

SEQ ID NO: 4456 - RNA, 22 nt, synthetic construct
  source 1..22: mol_type = other RNA
aatagaggaagcaactcatata

SEQ ID NO: 4457 - RNA, 22 nt, synthetic construct
  source 1..22: mol_type = other RNA
aatataaactttaactcgatgc

SEQ ID NO: 4458 - RNA, 22 nt, synthetic construct
  source 1..22: mol_type = other RNA
aatatatgagttgcttcctcta

SEQ ID NO: 4459 - RNA, 22 nt, synthetic construct
  source 1..22: mol_type = other RNA
aatatcacaactttcccagttt

SEQ ID NO: 4460 - RNA, 22 nt, synthetic construct
  source 1..22: mol_type = other RNA
aatatgattttttaaaactgcc

SEQ ID NO: 4461 - RNA, 22 nt, synthetic construct
  source 1..22: mol_type = other RNA
aatatgctgtgattctaataca

SEQ ID NO: 4462 - RNA, 22 nt, synthetic construct
  source 1..22: mol_type = other RNA
aatatgttcattcttactgtaa

SEQ ID NO: 4463 - RNA, 22 nt, synthetic construct
  source 1..22: mol_type = other RNA
aatatttacttaggattcacat

SEQ ID NO: 4464 - RNA, 22 nt, synthetic construct
  source 1..22: mol_type = other RNA
aatattttgttccagaaaagta

SEQ ID NO: 4465 - RNA, 22 nt, synthetic construct
  source 1..22: mol_type = other RNA
aatcaataggtgaacttattaa

SEQ ID NO: 4466 - RNA, 22 nt, synthetic construct
  source 1..22: mol_type = other RNA
aatcaattttagatggtcacaa

SEQ ID NO: 4467 - RNA, 22 nt, synthetic construct
  source 1..22: mol_type = other RNA
aatcacagcatatttaggggaa

SEQ ID NO: 4468 - RNA, 22 nt, synthetic construct
  source 1..22: mol_type = other RNA
aatcacataaccttaaagaata

SEQ ID NO: 4469 - RNA, 22 nt, synthetic construct
  source 1..22: mol_type = other RNA
aatcagcgttaatttcgacagc

SEQ ID NO: 4470 - RNA, 22 nt, synthetic construct
  source 1..22: mol_type = other RNA
aatcatatcaaacatttactcc

SEQ ID NO: 4471 - RNA, 22 nt, synthetic construct
  source 1..22: mol_type = other RNA
aatccctaaagattagatacaa

SEQ ID NO: 4472 - RNA, 22 nt, synthetic construct
  source 1..22: mol_type = other RNA
aatccctaaatccctaaagatt

SEQ ID NO: 4473 - RNA, 22 nt, synthetic construct
  source 1..22: mol_type = other RNA
aatccttaagagaaagcttgag

SEQ ID NO: 4474 - RNA, 22 nt, synthetic construct
  source 1..22: mol_type = other RNA
aatcgtcagcacagagtatgtg

SEQ ID NO: 4475 - RNA, 22 nt, synthetic construct
  source 1..22: mol_type = other RNA
aatctagattataatcaatagg

SEQ ID NO: 4476 - RNA, 22 nt, synthetic construct
  source 1..22: mol_type = other RNA
aatctagattgtgaccatctaa

SEQ ID NO: 4477 - RNA, 22 nt, synthetic construct
  source 1..22: mol_type = other RNA
aatctataattttcaggaccac

SEQ ID NO: 4478 - RNA, 22 nt, synthetic construct
  source 1..22: mol_type = other RNA
aatctatttctcaagctttctc

SEQ ID NO: 4479 - RNA, 22 nt, synthetic construct
  source 1..22: mol_type = other RNA
aatctgacaagattcctttaca

SEQ ID NO: 4480 - RNA, 22 nt, synthetic construct
  source 1..22: mol_type = other RNA
aatctggtattaaatccttaag

SEQ ID NO: 4481 - RNA, 22 nt, synthetic construct
  source 1..22: mol_type = other RNA
aatcttaaatagacagtgactt

SEQ ID NO: 4482 - RNA, 22 nt, synthetic construct
  source 1..22: mol_type = other RNA
aatcttgtcagattacagtaag

SEQ ID NO: 4483 - RNA, 22 nt, synthetic construct
  source 1..22: mol_type = other RNA
aatctttagggatttagggatt

SEQ ID NO: 4484 - RNA, 22 nt, synthetic construct
  source 1..22: mol_type = other RNA
aatgaacatatttgtggcatcg

SEQ ID NO: 4485 - RNA, 22 nt, synthetic construct
  source 1..22: mol_type = other RNA
aatgaagcagaattaaatactg

SEQ ID NO: 4486 - RNA, 22 nt, synthetic construct
  source 1..22: mol_type = other RNA
aatgaagcatcagtttaaaaat

SEQ ID NO: 4487 - RNA, 22 nt, synthetic construct
  source 1..22: mol_type = other RNA
aatgctaagtattgacaaaggt

SEQ ID NO: 4488 - RNA, 22 nt, synthetic construct
  source 1..22: mol_type = other RNA
aatggagatgactactaagtca

SEQ ID NO: 4489 - RNA, 22 nt, synthetic construct
  source 1..22: mol_type = other RNA
aatggctcctctcttcccccaa

SEQ ID NO: 4490 - RNA, 22 nt, synthetic construct
  source 1..22: mol_type = other RNA
aatgtaaacggtattctttaag

SEQ ID NO: 4491 - RNA, 22 nt, synthetic construct
  source 1..22: mol_type = other RNA
aatgtattagaatcacagcata

SEQ ID NO: 4492 - RNA, 22 nt, synthetic construct
  source 1..22: mol_type = other RNA
aatgtgacttagtagtcatctc

SEQ ID NO: 4493 - RNA, 22 nt, synthetic construct
  source 1..22: mol_type = other RNA
aatgtggtctaataatctggta

SEQ ID NO: 4494 - RNA, 22 nt, synthetic construct
  source 1..22: mol_type = other RNA
aattaaacccatttgttaaagg

SEQ ID NO: 4495 - RNA, 22 nt, synthetic construct
  source 1..22: mol_type = other RNA
aattaccagtcctctgtattta

SEQ ID NO: 4496 - RNA, 22 nt, synthetic construct
  source 1..22: mol_type = other RNA
aattatccaatatacatgtcat

SEQ ID NO: 4497 - RNA, 22 nt, synthetic construct
  source 1..22: mol_type = other RNA
aattattcttgcatgtttatcg

SEQ ID NO: 4498 - RNA, 22 nt, synthetic construct
  source 1..22: mol_type = other RNA
aattcaataaacaaagacccag

SEQ ID NO: 4499 - RNA, 22 nt, synthetic construct
  source 1..22: mol_type = other RNA
aattctgacaagtgatactgtg

SEQ ID NO: 4500 - RNA, 22 nt, synthetic construct
  source 1..22: mol_type = other RNA
aattctgcttcattaggtttca

SEQ ID NO: 4501 - RNA, 22 nt, synthetic construct
  source 1..22: mol_type = other RNA
aattgattcccacatcacaaaa

SEQ ID NO: 4502 - RNA, 22 nt, synthetic construct
  source 1..22: mol_type = other RNA
aattggacaatttcaaatgcaa

SEQ ID NO: 4503 - RNA, 22 nt, synthetic construct
  source 1..22: mol_type = other RNA
aattgtaaaggaatcttgtcag

SEQ ID NO: 4504 - RNA, 22 nt, synthetic construct
  source 1..22: mol_type = other RNA
aattgtacagttcttaaatgtt

SEQ ID NO: 4505 - RNA, 22 nt, synthetic construct
  source 1..22: mol_type = other RNA
aattgtccaattttgggggaag

SEQ ID NO: 4506 - RNA, 22 nt, synthetic construct
  source 1..22: mol_type = other RNA
aatttaaaatttcttactggca

SEQ ID NO: 4507 - RNA, 22 nt, synthetic construct
  source 1..22: mol_type = other RNA
aatttaaacattaacctcattc

SEQ ID NO: 4508 - RNA, 22 nt, synthetic construct
  source 1..22: mol_type = other RNA
aatttagggactgggtctttgt

SEQ ID NO: 4509 - RNA, 22 nt, synthetic construct
  source 1..22: mol_type = other RNA
aatttcaaaactaaaaatcgtc

SEQ ID NO: 4510 - RNA, 22 nt, synthetic construct
  source 1..22: mol_type = other RNA
aatttcgacagcttagtctgtg

SEQ ID NO: 4511 - RNA, 22 nt, synthetic construct
  source 1..22: mol_type = other RNA
aatttctataatttagggactg

SEQ ID NO: 4512 - RNA, 22 nt, synthetic construct
  source 1..22: mol_type = other RNA
aatttcttactggcagttttaa

SEQ ID NO: 4513 - RNA, 22 nt, synthetic construct
  source 1..22: mol_type = other RNA
aatttggagtaaatgtttgata

SEQ ID NO: 4514 - RNA, 22 nt, synthetic construct
  source 1..22: mol_type = other RNA
aatttgtatctaatctttaggg

SEQ ID NO: 4515 - RNA, 22 nt, synthetic construct
  source 1..22: mol_type = other RNA
aattttagatggtcacaatcta

SEQ ID NO: 4516 - RNA, 22 nt, synthetic construct
  source 1..22: mol_type = other RNA
aattttcaggaccacagactaa

SEQ ID NO: 4517 - RNA, 22 nt, synthetic construct
  source 1..22: mol_type = other RNA
aattttgggggaagagaggagc

SEQ ID NO: 4518 - RNA, 22 nt, synthetic construct
  source 1..22: mol_type = other RNA
aattttgtgatgtgggaatcaa

SEQ ID NO: 4519 - RNA, 22 nt, synthetic construct
  source 1..22: mol_type = other RNA
aatttttaaactgatgcttcat

SEQ ID NO: 4520 - RNA, 22 nt, synthetic construct
  source 1..22: mol_type = other RNA
aattttttaccacagtatcact

SEQ ID NO: 4521 - RNA, 22 nt, synthetic construct
  source 1..22: mol_type = other RNA
acaaaataatttggagtaaatg

SEQ ID NO: 4522 - RNA, 22 nt, synthetic construct
  source 1..22: mol_type = other RNA
acaaaatatttacttaggattc

SEQ ID NO: 4523 - RNA, 22 nt, synthetic construct
  source 1..22: mol_type = other RNA
acaaagacccagtccctaaatt

SEQ ID NO: 4524 - RNA, 22 nt, synthetic construct
  source 1..22: mol_type = other RNA
acaaaggtaggtcaccatataa

SEQ ID NO: 4525 - RNA, 22 nt, synthetic construct
  source 1..22: mol_type = other RNA
acaaataaggtatagtgatacc

SEQ ID NO: 4526 - RNA, 22 nt, synthetic construct
  source 1..22: mol_type = other RNA
acaaataattgtaaaggaatct

SEQ ID NO: 4527 - RNA, 22 nt, synthetic construct
  source 1..22: mol_type = other RNA
acaaatatgttcattcttactg

SEQ ID NO: 4528 - RNA, 22 nt, synthetic construct
  source 1..22: mol_type = other RNA
acaaatggagatgactactaag

SEQ ID NO: 4529 - RNA, 22 nt, synthetic construct
  source 1..22: mol_type = other RNA
acaaatttttaaactgatgctt

SEQ ID NO: 4530 - RNA, 22 nt, synthetic construct
  source 1..22: mol_type = other RNA
acaaattttttaccacagtatc

SEQ ID NO: 4531 - RNA, 22 nt, synthetic construct
  source 1..22: mol_type = other RNA
acaacagatccctaaatcccta

SEQ ID NO: 4532 - RNA, 22 nt, synthetic construct
  source 1..22: mol_type = other RNA
acaacatttaagaactgtacaa

SEQ ID NO: 4533 - RNA, 22 nt, synthetic construct
  source 1..22: mol_type = other RNA
acaactttcccagtttaaaaaa

SEQ ID NO: 4534 - RNA, 22 nt, synthetic construct
  source 1..22: mol_type = other RNA
acaagagtactagttttttaaa

SEQ ID NO: 4535 - RNA, 22 nt, synthetic construct
  source 1..22: mol_type = other RNA
acaagattcctttacaattatt

SEQ ID NO: 4536 - RNA, 22 nt, synthetic construct
  source 1..22: mol_type = other RNA
acaagcatgtatatatgtttaa

SEQ ID NO: 4537 - RNA, 22 nt, synthetic construct
  source 1..22: mol_type = other RNA
acaagtgatactgtggtaaaaa

SEQ ID NO: 4538 - RNA, 22 nt, synthetic construct
  source 1..22: mol_type = other RNA
acaagttactgaacgtttaaac

SEQ ID NO: 4539 - RNA, 22 nt, synthetic construct
  source 1..22: mol_type = other RNA
acaatcacataaccttaaagaa

SEQ ID NO: 4540 - RNA, 22 nt, synthetic construct
  source 1..22: mol_type = other RNA
acaattaccagtcctctgtatt

SEQ ID NO: 4541 - RNA, 22 nt, synthetic construct
  source 1..22: mol_type = other RNA
acacatactctgtgctgacgat

SEQ ID NO: 4542 - RNA, 22 nt, synthetic construct
  source 1..22: mol_type = other RNA
acacgaatgtattagaatcaca

SEQ ID NO: 4543 - RNA, 22 nt, synthetic construct
  source 1..22: mol_type = other RNA
acacttaatactatgaaaacaa

SEQ ID NO: 4544 - RNA, 22 nt, synthetic construct
  source 1..22: mol_type = other RNA
acagactaagctgtcgaaatta

SEQ ID NO: 4545 - RNA, 22 nt, synthetic construct
  source 1..22: mol_type = other RNA
acagaggactggtaattgtaca

SEQ ID NO: 4546 - RNA, 22 nt, synthetic construct
  source 1..22: mol_type = other RNA
acagagtatgtgtaaaaatctg

SEQ ID NO: 4547 - RNA, 22 nt, synthetic construct
  source 1..22: mol_type = other RNA
acagatccctaaatccctaaat

SEQ ID NO: 4548 - RNA, 22 nt, synthetic construct
  source 1..22: mol_type = other RNA
acagatttttacacatactctg

SEQ ID NO: 4549 - RNA, 22 nt, synthetic construct
  source 1..22: mol_type = other RNA
acagcatatttaggggaaatat

SEQ ID NO: 4550 - RNA, 22 nt, synthetic construct
  source 1..22: mol_type = other RNA
acagcctgacaagcatgtatat

SEQ ID NO: 4551 - RNA, 22 nt, synthetic construct
  source 1..22: mol_type = other RNA
acagcgaacttattttaataca

SEQ ID NO: 4552 - RNA, 22 nt, synthetic construct
  source 1..22: mol_type = other RNA
acagcttagtctgtggtcctga

SEQ ID NO: 4553 - RNA, 22 nt, synthetic construct
  source 1..22: mol_type = other RNA
acagtaagaatgaacatatttg

SEQ ID NO: 4554 - RNA, 22 nt, synthetic construct
  source 1..22: mol_type = other RNA
acagtatcacttgtcagaattt

SEQ ID NO: 4555 - RNA, 22 nt, synthetic construct
  source 1..22: mol_type = other RNA
acagtatttaattctgcttcat

SEQ ID NO: 4556 - RNA, 22 nt, synthetic construct
  source 1..22: mol_type = other RNA
acagtgactttaagataaaaaa

SEQ ID NO: 4557 - RNA, 22 nt, synthetic construct
  source 1..22: mol_type = other RNA
acagttcttaaatgttgtagta

SEQ ID NO: 4558 - RNA, 22 nt, synthetic construct
  source 1..22: mol_type = other RNA
acataaccttaaagaataccgt

SEQ ID NO: 4559 - RNA, 22 nt, synthetic construct
  source 1..22: mol_type = other RNA
acataatgctaagtattgacaa

SEQ ID NO: 4560 - RNA, 22 nt, synthetic construct
  source 1..22: mol_type = other RNA
acatacaatcacataaccttaa

SEQ ID NO: 4561 - RNA, 22 nt, synthetic construct
  source 1..22: mol_type = other RNA
acatactctgtgctgacgattt

SEQ ID NO: 4562 - RNA, 22 nt, synthetic construct
  source 1..22: mol_type = other RNA
acatagatcatacatatctttt

SEQ ID NO: 4563 - RNA, 22 nt, synthetic construct
  source 1..22: mol_type = other RNA
acatatatacatgcttgtcagg

SEQ ID NO: 4564 - RNA, 22 nt, synthetic construct
  source 1..22: mol_type = other RNA
acatatcttttatatatgtgac

SEQ ID NO: 4565 - RNA, 22 nt, synthetic construct
  source 1..22: mol_type = other RNA
acatatttgtggcatcgagtta

SEQ ID NO: 4566 - RNA, 22 nt, synthetic construct
  source 1..22: mol_type = other RNA
acatcacaacagatccctaaat

SEQ ID NO: 4567 - RNA, 22 nt, synthetic construct
  source 1..22: mol_type = other RNA
acatgaggtatcactatacctt

SEQ ID NO: 4568 - RNA, 22 nt, synthetic construct
  source 1..22: mol_type = other RNA
acatgcttgtcaggctgtttaa

SEQ ID NO: 4569 - RNA, 22 nt, synthetic construct
  source 1..22: mol_type = other RNA
acatgtatattggataatttga

SEQ ID NO: 4570 - RNA, 22 nt, synthetic construct
  source 1..22: mol_type = other RNA
acattaacctcattccaagtta

SEQ ID NO: 4571 - RNA, 22 nt, synthetic construct
  source 1..22: mol_type = other RNA
acattaacttggaatgaggtta

SEQ ID NO: 4572 - RNA, 22 nt, synthetic construct
  source 1..22: mol_type = other RNA
acattcgtgtaggttttcaagt

SEQ ID NO: 4573 - RNA, 22 nt, synthetic construct
  source 1..22: mol_type = other RNA
acattgactttaacatgaggta

SEQ ID NO: 4574 - RNA, 22 nt, synthetic construct
  source 1..22: mol_type = other RNA
acatttaagaactgtacaatta

SEQ ID NO: 4575 - RNA, 22 nt, synthetic construct
  source 1..22: mol_type = other RNA
acatttactccaaattattttg

SEQ ID NO: 4576 - RNA, 22 nt, synthetic construct
  source 1..22: mol_type = other RNA
acatttctcaatcaaaattctt

SEQ ID NO: 4577 - RNA, 22 nt, synthetic construct
  source 1..22: mol_type = other RNA
accaaaatggctcctctcttcc

SEQ ID NO: 4578 - RNA, 22 nt, synthetic construct
  source 1..22: mol_type = other RNA
accaaatagaggaagcaactca

SEQ ID NO: 4579 - RNA, 22 nt, synthetic construct
  source 1..22: mol_type = other RNA
accacagactaagctgtcgaaa

SEQ ID NO: 4580 - RNA, 22 nt, synthetic construct
  source 1..22: mol_type = other RNA
accacagtatcacttgtcagaa

SEQ ID NO: 4581 - RNA, 22 nt, synthetic construct
  source 1..22: mol_type = other RNA
accacattaacttggaatgagg

SEQ ID NO: 4582 - RNA, 22 nt, synthetic construct
  source 1..22: mol_type = other RNA
accagattattagaccacatta

SEQ ID NO: 4583 - RNA, 22 nt, synthetic construct
  source 1..22: mol_type = other RNA
accagtcctctgtatttagtca

SEQ ID NO: 4584 - RNA, 22 nt, synthetic construct
  source 1..22: mol_type = other RNA
accatataacttgggcactata

SEQ ID NO: 4585 - RNA, 22 nt, synthetic construct
  source 1..22: mol_type = other RNA
accatctaaaattgattcccac

SEQ ID NO: 4586 - RNA, 22 nt, synthetic construct
  source 1..22: mol_type = other RNA
acccagtccctaaattatagaa

SEQ ID NO: 4587 - RNA, 22 nt, synthetic construct
  source 1..22: mol_type = other RNA
acccatttgttaaaggatatag

SEQ ID NO: 4588 - RNA, 22 nt, synthetic construct
  source 1..22: mol_type = other RNA
accgtttacatttctcaatcaa

SEQ ID NO: 4589 - RNA, 22 nt, synthetic construct
  source 1..22: mol_type = other RNA
acctaatgaagcagaattaaat

SEQ ID NO: 4590 - RNA, 22 nt, synthetic construct
  source 1..22: mol_type = other RNA
acctacacgaatgtattagaat

SEQ ID NO: 4591 - RNA, 22 nt, synthetic construct
  source 1..22: mol_type = other RNA
acctacctttgtcaatacttag

SEQ ID NO: 4592 - RNA, 22 nt, synthetic construct
  source 1..22: mol_type = other RNA
acctattgattataatctagat

SEQ ID NO: 4593 - RNA, 22 nt, synthetic construct
  source 1..22: mol_type = other RNA
acctcatgttaaagtcaatgtg

SEQ ID NO: 4594 - RNA, 22 nt, synthetic construct
  source 1..22: mol_type = other RNA
acctcattccaagttaatgtgg

SEQ ID NO: 4595 - RNA, 22 nt, synthetic construct
  source 1..22: mol_type = other RNA
acctcgtaacaagttactgaac

SEQ ID NO: 4596 - RNA, 22 nt, synthetic construct
  source 1..22: mol_type = other RNA
accttaaagaataccgtttaca

SEQ ID NO: 4597 - RNA, 22 nt, synthetic construct
  source 1..22: mol_type = other RNA
acctttgtcaatacttagcatt

SEQ ID NO: 4598 - RNA, 22 nt, synthetic construct
  source 1..22: mol_type = other RNA
acgaatgtattagaatcacagc

SEQ ID NO: 4599 - RNA, 22 nt, synthetic construct
  source 1..22: mol_type = other RNA
acgaggtttatttctacttgaa

SEQ ID NO: 4600 - RNA, 22 nt, synthetic construct
  source 1..22: mol_type = other RNA
acggtattctttaaggttatgt

SEQ ID NO: 4601 - RNA, 22 nt, synthetic construct
  source 1..22: mol_type = other RNA
acgttcagtaacttgttacgag

SEQ ID NO: 4602 - RNA, 22 nt, synthetic construct
  source 1..22: mol_type = other RNA
acgtttaaacagcctgacaagc

SEQ ID NO: 4603 - RNA, 22 nt, synthetic construct
  source 1..22: mol_type = other RNA
actaaaaatcgtcagcacagag

SEQ ID NO: 4604 - RNA, 22 nt, synthetic construct
  source 1..22: mol_type = other RNA
actaaatacagaggactggtaa

SEQ ID NO: 4605 - RNA, 22 nt, synthetic construct
  source 1..22: mol_type = other RNA
actaagctgtcgaaattaacgc

SEQ ID NO: 4606 - RNA, 22 nt, synthetic construct
  source 1..22: mol_type = other RNA
actaagtcacattgactttaac

SEQ ID NO: 4607 - RNA, 22 nt, synthetic construct
  source 1..22: mol_type = other RNA
actacaacatttaagaactgta

SEQ ID NO: 4608 - RNA, 22 nt, synthetic construct
  source 1..22: mol_type = other RNA
actactaagtcacattgacttt

SEQ ID NO: 4609 - RNA, 22 nt, synthetic construct
  source 1..22: mol_type = other RNA
actagtactcttgttaaaactc

SEQ ID NO: 4610 - RNA, 22 nt, synthetic construct
  source 1..22: mol_type = other RNA
actagttttttaaactgggaaa

SEQ ID NO: 4611 - RNA, 22 nt, synthetic construct
  source 1..22: mol_type = other RNA
actatatcctttaacaaatggg

SEQ ID NO: 4612 - RNA, 22 nt, synthetic construct
  source 1..22: mol_type = other RNA
actccaaattattttgtagcaa

SEQ ID NO: 4613 - RNA, 22 nt, synthetic construct
  source 1..22: mol_type = other RNA
actcgatgccacaaatatgttc

SEQ ID NO: 4614 - RNA, 22 nt, synthetic construct
  source 1..22: mol_type = other RNA
actctaaacttgactaaataca

SEQ ID NO: 4615 - RNA, 22 nt, synthetic construct
  source 1..22: mol_type = other RNA
actctgtgctgacgatttttag

SEQ ID NO: 4616 - RNA, 22 nt, synthetic construct
  source 1..22: mol_type = other RNA
actcttgttaaaactctaaact

SEQ ID NO: 4617 - RNA, 22 nt, synthetic construct
  source 1..22: mol_type = other RNA
actgaacgtttaaacagcctga

SEQ ID NO: 4618 - RNA, 22 nt, synthetic construct
  source 1..22: mol_type = other RNA
actgaggcaaatttaaaaggca

SEQ ID NO: 4619 - RNA, 22 nt, synthetic construct
  source 1..22: mol_type = other RNA
actgatgcttcattttgctaca

SEQ ID NO: 4620 - RNA, 22 nt, synthetic construct
  source 1..22: mol_type = other RNA
actgccagtaagaaattttaaa

SEQ ID NO: 4621 - RNA, 22 nt, synthetic construct
  source 1..22: mol_type = other RNA
actggcagttttaaaaaatcat

SEQ ID NO: 4622 - RNA, 22 nt, synthetic construct
  source 1..22: mol_type = other RNA
actgggaaagttgtgatattag

SEQ ID NO: 4623 - RNA, 22 nt, synthetic construct
  source 1..22: mol_type = other RNA
actgggtctttgtttattgaat

SEQ ID NO: 4624 - RNA, 22 nt, synthetic construct
  source 1..22: mol_type = other RNA
actggtaattgtacagttctta

SEQ ID NO: 4625 - RNA, 22 nt, synthetic construct
  source 1..22: mol_type = other RNA
actgtaatctgacaagattcct

SEQ ID NO: 4626 - RNA, 22 nt, synthetic construct
  source 1..22: mol_type = other RNA
actgtacaattaccagtcctct

SEQ ID NO: 4627 - RNA, 22 nt, synthetic construct
  source 1..22: mol_type = other RNA
actgtattaaaataagttcgct

SEQ ID NO: 4628 - RNA, 22 nt, synthetic construct
  source 1..22: mol_type = other RNA
actgtctatttaagattaaaca

SEQ ID NO: 4629 - RNA, 22 nt, synthetic construct
  source 1..22: mol_type = other RNA
actgtggtaaaaaatttgtatc

SEQ ID NO: 4630 - RNA, 22 nt, synthetic construct
  source 1..22: mol_type = other RNA
acttagcattatgtatttcaaa

SEQ ID NO: 4631 - RNA, 22 nt, synthetic construct
  source 1..22: mol_type = other RNA
acttaggattcacatagatcat

SEQ ID NO: 4632 - RNA, 22 nt, synthetic construct
  source 1..22: mol_type = other RNA
acttagtagtcatctccatttg

SEQ ID NO: 4633 - RNA, 22 nt, synthetic construct
  source 1..22: mol_type = other RNA
acttgaaaacctacacgaatgt

SEQ ID NO: 4634 - RNA, 22 nt, synthetic construct
  source 1..22: mol_type = other RNA
acttgactaaatacagaggact

SEQ ID NO: 4635 - RNA, 22 nt, synthetic construct
  source 1..22: mol_type = other RNA
acttggaatgaggttaatgttt

SEQ ID NO: 4636 - RNA, 22 nt, synthetic construct
  source 1..22: mol_type = other RNA
acttgggcactatatcctttaa

SEQ ID NO: 4637 - RNA, 22 nt, synthetic construct
  source 1..22: mol_type = other RNA
acttgttacgaggtttatttct

SEQ ID NO: 4638 - RNA, 22 nt, synthetic construct
  source 1..22: mol_type = other RNA
actttaacatgaggtatcacta

SEQ ID NO: 4639 - RNA, 22 nt, synthetic construct
  source 1..22: mol_type = other RNA
actttaactcgatgccacaaat

SEQ ID NO: 4640 - RNA, 22 nt, synthetic construct
  source 1..22: mol_type = other RNA
actttcccagtttaaaaaacta

SEQ ID NO: 4641 - RNA, 22 nt, synthetic construct
  source 1..22: mol_type = other RNA
acttttattttaaaaggcatca

SEQ ID NO: 4642 - RNA, 22 nt, synthetic construct
  source 1..22: mol_type = other RNA
acttttctggaacaaaatattt

SEQ ID NO: 4643 - RNA, 22 nt, synthetic construct
  source 1..22: mol_type = other RNA
agaaagcttgagaaatagattt

SEQ ID NO: 4644 - RNA, 22 nt, synthetic construct
  source 1..22: mol_type = other RNA
agaaataaacctcgtaacaagt

SEQ ID NO: 4645 - RNA, 22 nt, synthetic construct
  source 1..22: mol_type = other RNA
agaaatgtaaacggtattcttt

SEQ ID NO: 4646 - RNA, 22 nt, synthetic construct
  source 1..22: mol_type = other RNA
agaactgtacaattaccagtcc

SEQ ID NO: 4647 - RNA, 22 nt, synthetic construct
  source 1..22: mol_type = other RNA
agaataccaaaatggctcctct

SEQ ID NO: 4648 - RNA, 22 nt, synthetic construct
  source 1..22: mol_type = other RNA
agaataccgtttacatttctca

SEQ ID NO: 4649 - RNA, 22 nt, synthetic construct
  source 1..22: mol_type = other RNA
agaatcacagcatatttagggg

SEQ ID NO: 4650 - RNA, 22 nt, synthetic construct
  source 1..22: mol_type = other RNA
agaatgaacatatttgtggcat

SEQ ID NO: 4651 - RNA, 22 nt, synthetic construct
  source 1..22: mol_type = other RNA
agaattttgattgagaaatgta

SEQ ID NO: 4652 - RNA, 22 nt, synthetic construct
  source 1..22: mol_type = other RNA
agacagcgaacttattttaata

SEQ ID NO: 4653 - RNA, 22 nt, synthetic construct
  source 1..22: mol_type = other RNA
agacagtgactttaagataaaa

SEQ ID NO: 4654 - RNA, 22 nt, synthetic construct
  source 1..22: mol_type = other RNA
agaccacattaacttggaatga

SEQ ID NO: 4655 - RNA, 22 nt, synthetic construct
  source 1..22: mol_type = other RNA
agacccagtccctaaattatag

SEQ ID NO: 4656 - RNA, 22 nt, synthetic construct
  source 1..22: mol_type = other RNA
agactaagctgtcgaaattaac

SEQ ID NO: 4657 - RNA, 22 nt, synthetic construct
  source 1..22: mol_type = other RNA
agacttttattttaaaaggcat

SEQ ID NO: 4658 - RNA, 22 nt, synthetic construct
  source 1..22: mol_type = other RNA
agagaaagcttgagaaatagat

SEQ ID NO: 4659 - RNA, 22 nt, synthetic construct
  source 1..22: mol_type = other RNA
agagacttttattttaaaaggc

SEQ ID NO: 4660 - RNA, 22 nt, synthetic construct
  source 1..22: mol_type = other RNA
agagaggagccattttggtatt

SEQ ID NO: 4661 - RNA, 22 nt, synthetic construct
  source 1..22: mol_type = other RNA
agaggaagcaactcatatatta

SEQ ID NO: 4662 - RNA, 22 nt, synthetic construct
  source 1..22: mol_type = other RNA
agaggactggtaattgtacagt

SEQ ID NO: 4663 - RNA, 22 nt, synthetic construct
  source 1..22: mol_type = other RNA
agaggagccattttggtattct

SEQ ID NO: 4664 - RNA, 22 nt, synthetic construct
  source 1..22: mol_type = other RNA
agagtactagttttttaaactg

SEQ ID NO: 4665 - RNA, 22 nt, synthetic construct
  source 1..22: mol_type = other RNA
agagtatgtgtaaaaatctgta

SEQ ID NO: 4666 - RNA, 22 nt, synthetic construct
  source 1..22: mol_type = other RNA
agagttttaacaagagtactag

SEQ ID NO: 4667 - RNA, 22 nt, synthetic construct
  source 1..22: mol_type = other RNA
agatacaaattttttaccacag

SEQ ID NO: 4668 - RNA, 22 nt, synthetic construct
  source 1..22: mol_type = other RNA
agatatgtatgatctatgtgaa

SEQ ID NO: 4669 - RNA, 22 nt, synthetic construct
  source 1..22: mol_type = other RNA
agatccctaaatccctaaatcc

SEQ ID NO: 4670 - RNA, 22 nt, synthetic construct
  source 1..22: mol_type = other RNA
agatgactactaagtcacattg

SEQ ID NO: 4671 - RNA, 22 nt, synthetic construct
  source 1..22: mol_type = other RNA
agatggtcacaatctagattat

SEQ ID NO: 4672 - RNA, 22 nt, synthetic construct
  source 1..22: mol_type = other RNA
agattaaacatacaatcacata

SEQ ID NO: 4673 - RNA, 22 nt, synthetic construct
  source 1..22: mol_type = other RNA
agattacagtaagaatgaacat

SEQ ID NO: 4674 - RNA, 22 nt, synthetic construct
  source 1..22: mol_type = other RNA
agattataatcaataggtgaac

SEQ ID NO: 4675 - RNA, 22 nt, synthetic construct
  source 1..22: mol_type = other RNA
agattattagaccacattaact

SEQ ID NO: 4676 - RNA, 22 nt, synthetic construct
  source 1..22: mol_type = other RNA
agattcctttacaattatttgt

SEQ ID NO: 4677 - RNA, 22 nt, synthetic construct
  source 1..22: mol_type = other RNA
agattgtgaccatctaaaattg

SEQ ID NO: 4678 - RNA, 22 nt, synthetic construct
  source 1..22: mol_type = other RNA
agatttttacacatactctgtg

SEQ ID NO: 4679 - RNA, 22 nt, synthetic construct
  source 1..22: mol_type = other RNA
agcaaaatgaagcatcagttta

SEQ ID NO: 4680 - RNA, 22 nt, synthetic construct
  source 1..22: mol_type = other RNA
agcacagagtatgtgtaaaaat

SEQ ID NO: 4681 - RNA, 22 nt, synthetic construct
  source 1..22: mol_type = other RNA
agcagaattaaatactgtatta

SEQ ID NO: 4682 - RNA, 22 nt, synthetic construct
  source 1..22: mol_type = other RNA
agcatatttaggggaaatataa

SEQ ID NO: 4683 - RNA, 22 nt, synthetic construct
  source 1..22: mol_type = other RNA
agcatcagtttaaaaatttgta

SEQ ID NO: 4684 - RNA, 22 nt, synthetic construct
  source 1..22: mol_type = other RNA
agccattttggtattctggccc

SEQ ID NO: 4685 - RNA, 22 nt, synthetic construct
  source 1..22: mol_type = other RNA
agcctgacaagcatgtatatat

SEQ ID NO: 4686 - RNA, 22 nt, synthetic construct
  source 1..22: mol_type = other RNA
agcgaacttattttaatacagt

SEQ ID NO: 4687 - RNA, 22 nt, synthetic construct
  source 1..22: mol_type = other RNA
agcgttaatttcgacagcttag

SEQ ID NO: 4688 - RNA, 22 nt, synthetic construct
  source 1..22: mol_type = other RNA
agctaatatcacaactttccca

SEQ ID NO: 4689 - RNA, 22 nt, synthetic construct
  source 1..22: mol_type = other RNA
agctcatatgatgccttttaaa

SEQ ID NO: 4690 - RNA, 22 nt, synthetic construct
  source 1..22: mol_type = other RNA
agctgtcgaaattaacgctgat

SEQ ID NO: 4691 - RNA, 22 nt, synthetic construct
  source 1..22: mol_type = other RNA
agcttagtctgtggtcctgaaa

SEQ ID NO: 4692 - RNA, 22 nt, synthetic construct
  source 1..22: mol_type = other RNA
agctttctcttaaggatttaat

SEQ ID NO: 4693 - RNA, 22 nt, synthetic construct
  source 1..22: mol_type = other RNA
aggaagcaactcatatattaaa

SEQ ID NO: 4694 - RNA, 22 nt, synthetic construct
  source 1..22: mol_type = other RNA
aggaatcttgtcagattacagt

SEQ ID NO: 4695 - RNA, 22 nt, synthetic construct
  source 1..22: mol_type = other RNA
aggaccacagactaagctgtcg

SEQ ID NO: 4696 - RNA, 22 nt, synthetic construct
  source 1..22: mol_type = other RNA
aggactggtaattgtacagttc

SEQ ID NO: 4697 - RNA, 22 nt, synthetic construct
  source 1..22: mol_type = other RNA
aggagccattttggtattctgg

SEQ ID NO: 4698 - RNA, 22 nt, synthetic construct
  source 1..22: mol_type = other RNA
aggatatagtgcccaagttata

SEQ ID NO: 4699 - RNA, 22 nt, synthetic construct
  source 1..22: mol_type = other RNA
aggattcacatagatcatacat

SEQ ID NO: 4700 - RNA, 22 nt, synthetic construct
  source 1..22: mol_type = other RNA
aggatttaataccagattatta

SEQ ID NO: 4701 - RNA, 22 nt, synthetic construct
  source 1..22: mol_type = other RNA
aggcaaatttaaaaggcaataa

SEQ ID NO: 4702 - RNA, 22 nt, synthetic construct
  source 1..22: mol_type = other RNA
aggcaataatttaaacattaac

SEQ ID NO: 4703 - RNA, 22 nt, synthetic construct
  source 1..22: mol_type = other RNA
aggcatcatatgagctaatatc

SEQ ID NO: 4704 - RNA, 22 nt, synthetic construct
  source 1..22: mol_type = other RNA
aggctgtttaaacgttcagtaa

SEQ ID NO: 4705 - RNA, 22 nt, synthetic construct
  source 1..22: mol_type = other RNA
agggactgggtctttgtttatt

SEQ ID NO: 4706 - RNA, 22 nt, synthetic construct
  source 1..22: mol_type = other RNA
agggatctgttgtgatgtcgat

SEQ ID NO: 4707 - RNA, 22 nt, synthetic construct
  source 1..22: mol_type = other RNA
agggatttagggatctgttgtg

SEQ ID NO: 4708 - RNA, 22 nt, synthetic construct
  source 1..22: mol_type = other RNA
agggatttagggatttagggat

SEQ ID NO: 4709 - RNA, 22 nt, synthetic construct
  source 1..22: mol_type = other RNA
agggccagaataccaaaatggc

SEQ ID NO: 4710 - RNA, 22 nt, synthetic construct
  source 1..22: mol_type = other RNA
aggggaaatataaactttaact

SEQ ID NO: 4711 - RNA, 22 nt, synthetic construct
  source 1..22: mol_type = other RNA
aggtaggtcaccatataacttg

SEQ ID NO: 4712 - RNA, 22 nt, synthetic construct
  source 1..22: mol_type = other RNA
aggtatagtgatacctcatgtt

SEQ ID NO: 4713 - RNA, 22 nt, synthetic construct
  source 1..22: mol_type = other RNA
aggtatcactataccttatttg

SEQ ID NO: 4714 - RNA, 22 nt, synthetic construct
  source 1..22: mol_type = other RNA
aggtcaccatataacttgggca

SEQ ID NO: 4715 - RNA, 22 nt, synthetic construct
  source 1..22: mol_type = other RNA
aggtgaacttattaaataactt

SEQ ID NO: 4716 - RNA, 22 nt, synthetic construct
  source 1..22: mol_type = other RNA
aggttaatgtttaaattattgc

SEQ ID NO: 4717 - RNA, 22 nt, synthetic construct
  source 1..22: mol_type = other RNA
aggttatgtgattgtatgttta

SEQ ID NO: 4718 - RNA, 22 nt, synthetic construct
  source 1..22: mol_type = other RNA
aggtttatttctacttgaaaac

SEQ ID NO: 4719 - RNA, 22 nt, synthetic construct
  source 1..22: mol_type = other RNA
aggttttcaagtagaaataaac

SEQ ID NO: 4720 - RNA, 22 nt, synthetic construct
  source 1..22: mol_type = other RNA
agtaaatattttgttccagaaa

SEQ ID NO: 4721 - RNA, 22 nt, synthetic construct
  source 1..22: mol_type = other RNA
agtaacttgttacgaggtttat

SEQ ID NO: 4722 - RNA, 22 nt, synthetic construct
  source 1..22: mol_type = other RNA
agtaagaatgaacatatttgtg

SEQ ID NO: 4723 - RNA, 22 nt, synthetic construct
  source 1..22: mol_type = other RNA
agtactagttttttaaactggg

SEQ ID NO: 4724 - RNA, 22 nt, synthetic construct
  source 1..22: mol_type = other RNA
agtactcttgttaaaactctaa

SEQ ID NO: 4725 - RNA, 22 nt, synthetic construct
  source 1..22: mol_type = other RNA
agtagaaataaacctcgtaaca

SEQ ID NO: 4726 - RNA, 22 nt, synthetic construct
  source 1..22: mol_type = other RNA
agtagtcatctccatttgttta

SEQ ID NO: 4727 - RNA, 22 nt, synthetic construct
  source 1..22: mol_type = other RNA
agtatcacttgtcagaatttat

SEQ ID NO: 4728 - RNA, 22 nt, synthetic construct
  source 1..22: mol_type = other RNA
agtatgtgtaaaaatctgtaat

SEQ ID NO: 4729 - RNA, 22 nt, synthetic construct
  source 1..22: mol_type = other RNA
agtattgacaaaggtaggtcac

SEQ ID NO: 4730 - RNA, 22 nt, synthetic construct
  source 1..22: mol_type = other RNA
agtatttaattctgcttcatta

SEQ ID NO: 4731 - RNA, 22 nt, synthetic construct
  source 1..22: mol_type = other RNA
agtcaagtttagagttttaaca

SEQ ID NO: 4732 - RNA, 22 nt, synthetic construct
  source 1..22: mol_type = other RNA
agtcaatgtgacttagtagtca

SEQ ID NO: 4733 - RNA, 22 nt, synthetic construct
  source 1..22: mol_type = other RNA
agtcacattgactttaacatga

SEQ ID NO: 4734 - RNA, 22 nt, synthetic construct
  source 1..22: mol_type = other RNA
agtcactgtctatttaagatta

SEQ ID NO: 4735 - RNA, 22 nt, synthetic construct
  source 1..22: mol_type = other RNA
agtcatctccatttgtttaaag

SEQ ID NO: 4736 - RNA, 22 nt, synthetic construct
  source 1..22: mol_type = other RNA
agtccctaaattatagaaattt

SEQ ID NO: 4737 - RNA, 22 nt, synthetic construct
  source 1..22: mol_type = other RNA
agtcctctgtatttagtcaagt

SEQ ID NO: 4738 - RNA, 22 nt, synthetic construct
  source 1..22: mol_type = other RNA
agtctgtggtcctgaaaattat

SEQ ID NO: 4739 - RNA, 22 nt, synthetic construct
  source 1..22: mol_type = other RNA
agtgatacctcatgttaaagtc

SEQ ID NO: 4740 - RNA, 22 nt, synthetic construct
  source 1..22: mol_type = other RNA
agtgatactgtggtaaaaaatt

SEQ ID NO: 4741 - RNA, 22 nt, synthetic construct
  source 1..22: mol_type = other RNA
agtgcccaagttatatggtgac

SEQ ID NO: 4742 - RNA, 22 nt, synthetic construct
  source 1..22: mol_type = other RNA
agttaaagtttatatttcccct

SEQ ID NO: 4743 - RNA, 22 nt, synthetic construct
  source 1..22: mol_type = other RNA
agttaatgtggtctaataatct

SEQ ID NO: 4744 - RNA, 22 nt, synthetic construct
  source 1..22: mol_type = other RNA
agttactgaacgtttaaacagc

SEQ ID NO: 4745 - RNA, 22 nt, synthetic construct
  source 1..22: mol_type = other RNA
agttatatggtgacctaccttt

SEQ ID NO: 4746 - RNA, 22 nt, synthetic construct
  source 1..22: mol_type = other RNA
agttatttaataagttcaccta

SEQ ID NO: 4747 - RNA, 22 nt, synthetic construct
  source 1..22: mol_type = other RNA
agttcacctattgattataatc

SEQ ID NO: 4748 - RNA, 22 nt, synthetic construct
  source 1..22: mol_type = other RNA
agttcgctgtctttaaacaaat

SEQ ID NO: 4749 - RNA, 22 nt, synthetic construct
  source 1..22: mol_type = other RNA
agttcttaaatgttgtagtatt

SEQ ID NO: 4750 - RNA, 22 nt, synthetic construct
  source 1..22: mol_type = other RNA
agttgtgatattagctcatatg

SEQ ID NO: 4751 - RNA, 22 nt, synthetic construct
  source 1..22: mol_type = other RNA
agtttaaaaaactagtactctt

SEQ ID NO: 4752 - RNA, 22 nt, synthetic construct
  source 1..22: mol_type = other RNA
agtttagagttttaacaagagt

SEQ ID NO: 4753 - RNA, 22 nt, synthetic construct
  source 1..22: mol_type = other RNA
agtttatatttcccctaaatat

SEQ ID NO: 4754 - RNA, 22 nt, synthetic construct
  source 1..22: mol_type = other RNA
agttttaacaagagtactagtt

SEQ ID NO: 4755 - RNA, 22 nt, synthetic construct
  source 1..22: mol_type = other RNA
agttttttaaactgggaaagtt

SEQ ID NO: 4756 - RNA, 22 nt, synthetic construct
  source 1..22: mol_type = other RNA
ataaacaaagacccagtcccta

SEQ ID NO: 4757 - RNA, 22 nt, synthetic construct
  source 1..22: mol_type = other RNA
ataaacctcgtaacaagttact

SEQ ID NO: 4758 - RNA, 22 nt, synthetic construct
  source 1..22: mol_type = other RNA
ataaactttaactcgatgccac

SEQ ID NO: 4759 - RNA, 22 nt, synthetic construct
  source 1..22: mol_type = other RNA
ataaattctgacaagtgatact

SEQ ID NO: 4760 - RNA, 22 nt, synthetic construct
  source 1..22: mol_type = other RNA
ataaccttaaagaataccgttt

SEQ ID NO: 4761 - RNA, 22 nt, synthetic construct
  source 1..22: mol_type = other RNA
ataacttgggcactatatcctt

SEQ ID NO: 4762 - RNA, 22 nt, synthetic construct
  source 1..22: mol_type = other RNA
ataaggtatagtgatacctcat

SEQ ID NO: 4763 - RNA, 22 nt, synthetic construct
  source 1..22: mol_type = other RNA
ataagttcacctattgattata

SEQ ID NO: 4764 - RNA, 22 nt, synthetic construct
  source 1..22: mol_type = other RNA
ataagttcgctgtctttaaaca

SEQ ID NO: 4765 - RNA, 22 nt, synthetic construct
  source 1..22: mol_type = other RNA
ataatcaataggtgaacttatt

SEQ ID NO: 4766 - RNA, 22 nt, synthetic construct
  source 1..22: mol_type = other RNA
ataatctagattgtgaccatct

SEQ ID NO: 4767 - RNA, 22 nt, synthetic construct
  source 1..22: mol_type = other RNA
ataatctataattttcaggacc

SEQ ID NO: 4768 - RNA, 22 nt, synthetic construct
  source 1..22: mol_type = other RNA
ataatctggtattaaatcctta

SEQ ID NO: 4769 - RNA, 22 nt, synthetic construct
  source 1..22: mol_type = other RNA
ataatgctaagtattgacaaag

SEQ ID NO: 4770 - RNA, 22 nt, synthetic construct
  source 1..22: mol_type = other RNA
ataattgtaaaggaatcttgtc

SEQ ID NO: 4771 - RNA, 22 nt, synthetic construct
  source 1..22: mol_type = other RNA
ataatttagggactgggtcttt

SEQ ID NO: 4772 - RNA, 22 nt, synthetic construct
  source 1..22: mol_type = other RNA
ataatttggagtaaatgtttga

SEQ ID NO: 4773 - RNA, 22 nt, synthetic construct
  source 1..22: mol_type = other RNA
ataattttcaggaccacagact

SEQ ID NO: 4774 - RNA, 22 nt, synthetic construct
  source 1..22: mol_type = other RNA
atacaaatttttaaactgatgc

SEQ ID NO: 4775 - RNA, 22 nt, synthetic construct
  source 1..22: mol_type = other RNA
atacaaattttttaccacagta

SEQ ID NO: 4776 - RNA, 22 nt, synthetic construct
  source 1..22: mol_type = other RNA
atacaatcacataaccttaaag

SEQ ID NO: 4777 - RNA, 22 nt, synthetic construct
  source 1..22: mol_type = other RNA
atacagaggactggtaattgta

SEQ ID NO: 4778 - RNA, 22 nt, synthetic construct
  source 1..22: mol_type = other RNA
atacagtatttaattctgcttc

SEQ ID NO: 4779 - RNA, 22 nt, synthetic construct
  source 1..22: mol_type = other RNA
atacataatgctaagtattgac

SEQ ID NO: 4780 - RNA, 22 nt, synthetic construct
  source 1..22: mol_type = other RNA
atacatgcttgtcaggctgttt

SEQ ID NO: 4781 - RNA, 22 nt, synthetic construct
  source 1..22: mol_type = other RNA
atacattcgtgtaggttttcaa

SEQ ID NO: 4782 - RNA, 22 nt, synthetic construct
  source 1..22: mol_type = other RNA
ataccaaaatggctcctctctt

SEQ ID NO: 4783 - RNA, 22 nt, synthetic construct
  source 1..22: mol_type = other RNA
ataccagattattagaccacat

SEQ ID NO: 4784 - RNA, 22 nt, synthetic construct
  source 1..22: mol_type = other RNA
ataccgtttacatttctcaatc

SEQ ID NO: 4785 - RNA, 22 nt, synthetic construct
  source 1..22: mol_type = other RNA
atacctcatgttaaagtcaatg

SEQ ID NO: 4786 - RNA, 22 nt, synthetic construct
  source 1..22: mol_type = other RNA
atactacaacatttaagaactg

SEQ ID NO: 4787 - RNA, 22 nt, synthetic construct
  source 1..22: mol_type = other RNA
atactctgtgctgacgattttt

SEQ ID NO: 4788 - RNA, 22 nt, synthetic construct
  source 1..22: mol_type = other RNA
atactgtattaaaataagttcg

SEQ ID NO: 4789 - RNA, 22 nt, synthetic construct
  source 1..22: mol_type = other RNA
atactgtggtaaaaaatttgta

SEQ ID NO: 4790 - RNA, 22 nt, synthetic construct
  source 1..22: mol_type = other RNA
atacttagcattatgtatttca

SEQ ID NO: 4791 - RNA, 22 nt, synthetic construct
  source 1..22: mol_type = other RNA
atagacagtgactttaagataa

SEQ ID NO: 4792 - RNA, 22 nt, synthetic construct
  source 1..22: mol_type = other RNA
atagaggaagcaactcatatat

SEQ ID NO: 4793 - RNA, 22 nt, synthetic construct
  source 1..22: mol_type = other RNA
ataggtgaacttattaaataac

SEQ ID NO: 4794 - RNA, 22 nt, synthetic construct
  source 1..22: mol_type = other RNA
atagtgatacctcatgttaaag

SEQ ID NO: 4795 - RNA, 22 nt, synthetic construct
  source 1..22: mol_type = other RNA
atagtgcccaagttatatggtg

SEQ ID NO: 4796 - RNA, 22 nt, synthetic construct
  source 1..22: mol_type = other RNA
atataaactttaactcgatgcc

SEQ ID NO: 4797 - RNA, 22 nt, synthetic construct
  source 1..22: mol_type = other RNA
atataacttgggcactatatcc

SEQ ID NO: 4798 - RNA, 22 nt, synthetic construct
  source 1..22: mol_type = other RNA
atatacatgcttgtcaggctgt

SEQ ID NO: 4799 - RNA, 22 nt, synthetic construct
  source 1..22: mol_type = other RNA
atatagtgcccaagttatatgg

SEQ ID NO: 4800 - RNA, 22 nt, synthetic construct
  source 1..22: mol_type = other RNA
atatatacatgcttgtcaggct

SEQ ID NO: 4801 - RNA, 22 nt, synthetic construct
  source 1..22: mol_type = other RNA
atatatatgacatgtatattgg

SEQ ID NO: 4802 - RNA, 22 nt, synthetic construct
  source 1..22: mol_type = other RNA
atatatgacatgtatattggat

SEQ ID NO: 4803 - RNA, 22 nt, synthetic construct
  source 1..22: mol_type = other RNA
atatatgagttgcttcctctat

SEQ ID NO: 4804 - RNA, 22 nt, synthetic construct
  source 1..22: mol_type = other RNA
atatcaaacatttactccaaat

SEQ ID NO: 4805 - RNA, 22 nt, synthetic construct
  source 1..22: mol_type = other RNA
atatcacaactttcccagttta

SEQ ID NO: 4806 - RNA, 22 nt, synthetic construct
  source 1..22: mol_type = other RNA
atatcctttaacaaatgggttt

SEQ ID NO: 4807 - RNA, 22 nt, synthetic construct
  source 1..22: mol_type = other RNA
atatgacatgtatattggataa

SEQ ID NO: 4808 - RNA, 22 nt, synthetic construct
  source 1..22: mol_type = other RNA
atatgagctaatatcacaactt

SEQ ID NO: 4809 - RNA, 22 nt, synthetic construct
  source 1..22: mol_type = other RNA
atatgattttttaaaactgcca

SEQ ID NO: 4810 - RNA, 22 nt, synthetic construct
  source 1..22: mol_type = other RNA
atatgctgtgattctaatacat

SEQ ID NO: 4811 - RNA, 22 nt, synthetic construct
  source 1..22: mol_type = other RNA
atatggtgacctacctttgtca

SEQ ID NO: 4812 - RNA, 22 nt, synthetic construct
  source 1..22: mol_type = other RNA
atatgtatgatctatgtgaatc

SEQ ID NO: 4813 - RNA, 22 nt, synthetic construct
  source 1..22: mol_type = other RNA
atatgttcattcttactgtaat

SEQ ID NO: 4814 - RNA, 22 nt, synthetic construct
  source 1..22: mol_type = other RNA
atattagctcatatgatgcctt

SEQ ID NO: 4815 - RNA, 22 nt, synthetic construct
  source 1..22: mol_type = other RNA
atatttacttaggattcacata

SEQ ID NO: 4816 - RNA, 22 nt, synthetic construct
  source 1..22: mol_type = other RNA
atatttaggggaaatataaact

SEQ ID NO: 4817 - RNA, 22 nt, synthetic construct
  source 1..22: mol_type = other RNA
atatttcccctaaatatgctgt

SEQ ID NO: 4818 - RNA, 22 nt, synthetic construct
  source 1..22: mol_type = other RNA
atatttgtggcatcgagttaaa

SEQ ID NO: 4819 - RNA, 22 nt, synthetic construct
  source 1..22: mol_type = other RNA
atattttgttccagaaaagtac

SEQ ID NO: 4820 - RNA, 22 nt, synthetic construct
  source 1..22: mol_type = other RNA
atcaaacatttactccaaatta

SEQ ID NO: 4821 - RNA, 22 nt, synthetic construct
  source 1..22: mol_type = other RNA
atcaataggtgaacttattaaa

SEQ ID NO: 4822 - RNA, 22 nt, synthetic construct
  source 1..22: mol_type = other RNA
atcaattttagatggtcacaat

SEQ ID NO: 4823 - RNA, 22 nt, synthetic construct
  source 1..22: mol_type = other RNA
atcacaacagatccctaaatcc

SEQ ID NO: 4824 - RNA, 22 nt, synthetic construct
  source 1..22: mol_type = other RNA
atcacaactttcccagtttaaa

SEQ ID NO: 4825 - RNA, 22 nt, synthetic construct
  source 1..22: mol_type = other RNA
atcacagcatatttaggggaaa

SEQ ID NO: 4826 - RNA, 22 nt, synthetic construct
  source 1..22: mol_type = other RNA
atcacataaccttaaagaatac

SEQ ID NO: 4827 - RNA, 22 nt, synthetic construct
  source 1..22: mol_type = other RNA
atcactataccttatttgttaa

SEQ ID NO: 4828 - RNA, 22 nt, synthetic construct
  source 1..22: mol_type = other RNA
atcacttgtcagaatttatttt

SEQ ID NO: 4829 - RNA, 22 nt, synthetic construct
  source 1..22: mol_type = other RNA
atcagcgttaatttcgacagct

SEQ ID NO: 4830 - RNA, 22 nt, synthetic construct
  source 1..22: mol_type = other RNA
atcatatcaaacatttactcca

SEQ ID NO: 4831 - RNA, 22 nt, synthetic construct
  source 1..22: mol_type = other RNA
atcatatgagctaatatcacaa

SEQ ID NO: 4832 - RNA, 22 nt, synthetic construct
  source 1..22: mol_type = other RNA
atccaatatacatgtcatatat

SEQ ID NO: 4833 - RNA, 22 nt, synthetic construct
  source 1..22: mol_type = other RNA
atccctaaagattagatacaaa

SEQ ID NO: 4834 - RNA, 22 nt, synthetic construct
  source 1..22: mol_type = other RNA
atccctaaatccctaaagatta

SEQ ID NO: 4835 - RNA, 22 nt, synthetic construct
  source 1..22: mol_type = other RNA
atccctaaatccctaaatccct

SEQ ID NO: 4836 - RNA, 22 nt, synthetic construct
  source 1..22: mol_type = other RNA
atcctaagtaaatattttgttc

SEQ ID NO: 4837 - RNA, 22 nt, synthetic construct
  source 1..22: mol_type = other RNA
atccttaagagaaagcttgaga

SEQ ID NO: 4838 - RNA, 22 nt, synthetic construct
  source 1..22: mol_type = other RNA
atcctttaacaaatgggtttaa

SEQ ID NO: 4839 - RNA, 22 nt, synthetic construct
  source 1..22: mol_type = other RNA
atcgacatcacaacagatccct

SEQ ID NO: 4840 - RNA, 22 nt, synthetic construct
  source 1..22: mol_type = other RNA
atcgagttaaagtttatatttc

SEQ ID NO: 4841 - RNA, 22 nt, synthetic construct
  source 1..22: mol_type = other RNA
atcgtcagcacagagtatgtgt

SEQ ID NO: 4842 - RNA, 22 nt, synthetic construct
  source 1..22: mol_type = other RNA
atctaaaattgattcccacatc

SEQ ID NO: 4843 - RNA, 22 nt, synthetic construct
  source 1..22: mol_type = other RNA
atctaatctttagggatttagg

SEQ ID NO: 4844 - RNA, 22 nt, synthetic construct
  source 1..22: mol_type = other RNA
atctagattataatcaataggt

SEQ ID NO: 4845 - RNA, 22 nt, synthetic construct
  source 1..22: mol_type = other RNA
atctagattgtgaccatctaaa

SEQ ID NO: 4846 - RNA, 22 nt, synthetic construct
  source 1..22: mol_type = other RNA
atctataattttcaggaccaca

SEQ ID NO: 4847 - RNA, 22 nt, synthetic construct
  source 1..22: mol_type = other RNA
atctatgtgaatcctaagtaaa

SEQ ID NO: 4848 - RNA, 22 nt, synthetic construct
  source 1..22: mol_type = other RNA
atctatttctcaagctttctct

SEQ ID NO: 4849 - RNA, 22 nt, synthetic construct
  source 1..22: mol_type = other RNA
atctccatttgtttaaagacag

SEQ ID NO: 4850 - RNA, 22 nt, synthetic construct
  source 1..22: mol_type = other RNA
atctgacaagattcctttacaa

SEQ ID NO: 4851 - RNA, 22 nt, synthetic construct
  source 1..22: mol_type = other RNA
atctggtattaaatccttaaga

SEQ ID NO: 4852 - RNA, 22 nt, synthetic construct
  source 1..22: mol_type = other RNA
atctgttgtgatgtcgataaac

SEQ ID NO: 4853 - RNA, 22 nt, synthetic construct
  source 1..22: mol_type = other RNA
atcttaaagtcactgtctattt

SEQ ID NO: 4854 - RNA, 22 nt, synthetic construct
  source 1..22: mol_type = other RNA
atcttaaatagacagtgacttt

SEQ ID NO: 4855 - RNA, 22 nt, synthetic construct
  source 1..22: mol_type = other RNA
atcttgtcagattacagtaaga

SEQ ID NO: 4856 - RNA, 22 nt, synthetic construct
  source 1..22: mol_type = other RNA
atctttagggatttagggattt

SEQ ID NO: 4857 - RNA, 22 nt, synthetic construct
  source 1..22: mol_type = other RNA
atgaaacctaatgaagcagaat

SEQ ID NO: 4858 - RNA, 22 nt, synthetic construct
  source 1..22: mol_type = other RNA
atgaacatatttgtggcatcga

SEQ ID NO: 4859 - RNA, 22 nt, synthetic construct
  source 1..22: mol_type = other RNA
atgaagcagaattaaatactgt

SEQ ID NO: 4860 - RNA, 22 nt, synthetic construct
  source 1..22: mol_type = other RNA
atgaagcatcagtttaaaaatt

SEQ ID NO: 4861 - RNA, 22 nt, synthetic construct
  source 1..22: mol_type = other RNA
atgacatgtatattggataatt

SEQ ID NO: 4862 - RNA, 22 nt, synthetic construct
  source 1..22: mol_type = other RNA
atgactactaagtcacattgac

SEQ ID NO: 4863 - RNA, 22 nt, synthetic construct
  source 1..22: mol_type = other RNA
atgagctaatatcacaactttc

SEQ ID NO: 4864 - RNA, 22 nt, synthetic construct
  source 1..22: mol_type = other RNA
atgaggtatcactataccttat

SEQ ID NO: 4865 - RNA, 22 nt, synthetic construct
  source 1..22: mol_type = other RNA
atgatctatgtgaatcctaagt

SEQ ID NO: 4866 - RNA, 22 nt, synthetic construct
  source 1..22: mol_type = other RNA
atgatgccttttaaaataaaag

SEQ ID NO: 4867 - RNA, 22 nt, synthetic construct
  source 1..22: mol_type = other RNA
atgattttttaaaactgccagt

SEQ ID NO: 4868 - RNA, 22 nt, synthetic construct
  source 1..22: mol_type = other RNA
atgccacaaatatgttcattct

SEQ ID NO: 4869 - RNA, 22 nt, synthetic construct
  source 1..22: mol_type = other RNA
atgccttttaaaataaaagtct

SEQ ID NO: 4870 - RNA, 22 nt, synthetic construct
  source 1..22: mol_type = other RNA
atgctaagtattgacaaaggta

SEQ ID NO: 4871 - RNA, 22 nt, synthetic construct
  source 1..22: mol_type = other RNA
atgctgtgattctaatacattc

SEQ ID NO: 4872 - RNA, 22 nt, synthetic construct
  source 1..22: mol_type = other RNA
atgcttcattttgctacaaaat

SEQ ID NO: 4873 - RNA, 22 nt, synthetic construct
  source 1..22: mol_type = other RNA
atgcttgtcaggctgtttaaac

SEQ ID NO: 4874 - RNA, 22 nt, synthetic construct
  source 1..22: mol_type = other RNA
atggagatgactactaagtcac

SEQ ID NO: 4875 - RNA, 22 nt, synthetic construct
  source 1..22: mol_type = other RNA
atggctcctctcttcccccaaa

SEQ ID NO: 4876 - RNA, 22 nt, synthetic construct
  source 1..22: mol_type = other RNA
atggtcacaatctagattataa

SEQ ID NO: 4877 - RNA, 22 nt, synthetic construct
  source 1..22: mol_type = other RNA
atggtgacctacctttgtcaat

SEQ ID NO: 4878 - RNA, 22 nt, synthetic construct
  source 1..22: mol_type = other RNA
atgtaaacggtattctttaagg

SEQ ID NO: 4879 - RNA, 22 nt, synthetic construct
  source 1..22: mol_type = other RNA
atgtatgatctatgtgaatcct

SEQ ID NO: 4880 - RNA, 22 nt, synthetic construct
  source 1..22: mol_type = other RNA
atgtattagaatcacagcatat

SEQ ID NO: 4881 - RNA, 22 nt, synthetic construct
  source 1..22: mol_type = other RNA
atgtcgataaacatgcaagaat

SEQ ID NO: 4882 - RNA, 22 nt, synthetic construct
  source 1..22: mol_type = other RNA
atgtgaatcctaagtaaatatt

SEQ ID NO: 4883 - RNA, 22 nt, synthetic construct
  source 1..22: mol_type = other RNA
atgtgacttagtagtcatctcc

SEQ ID NO: 4884 - RNA, 22 nt, synthetic construct
  source 1..22: mol_type = other RNA
atgtgattgtatgtttaatctt

SEQ ID NO: 4885 - RNA, 22 nt, synthetic construct
  source 1..22: mol_type = other RNA
atgtgggaatcaattttagatg

SEQ ID NO: 4886 - RNA, 22 nt, synthetic construct
  source 1..22: mol_type = other RNA
atgtggtctaataatctggtat

SEQ ID NO: 4887 - RNA, 22 nt, synthetic construct
  source 1..22: mol_type = other RNA
atgtgtaaaaatctgtaataca

SEQ ID NO: 4888 - RNA, 22 nt, synthetic construct
  source 1..22: mol_type = other RNA
atgttaaagtcaatgtgactta

SEQ ID NO: 4889 - RNA, 22 nt, synthetic construct
  source 1..22: mol_type = other RNA
atgttcattcttactgtaatct

SEQ ID NO: 4890 - RNA, 22 nt, synthetic construct
  source 1..22: mol_type = other RNA
atgtttaatcttaaatagacag

SEQ ID NO: 4891 - RNA, 22 nt, synthetic construct
  source 1..22: mol_type = other RNA
atgtttatcgacatcacaacag

SEQ ID NO: 4892 - RNA, 22 nt, synthetic construct
  source 1..22: mol_type = other RNA
attaaaataagttcgctgtctt

SEQ ID NO: 4893 - RNA, 22 nt, synthetic construct
  source 1..22: mol_type = other RNA
attaaacatacaatcacataac

SEQ ID NO: 4894 - RNA, 22 nt, synthetic construct
  source 1..22: mol_type = other RNA
attaaacccatttgttaaagga

SEQ ID NO: 4895 - RNA, 22 nt, synthetic construct
  source 1..22: mol_type = other RNA
attaaatccttaagagaaagct

SEQ ID NO: 4896 - RNA, 22 nt, synthetic construct
  source 1..22: mol_type = other RNA
attaacctcattccaagttaat

SEQ ID NO: 4897 - RNA, 22 nt, synthetic construct
  source 1..22: mol_type = other RNA
attaacttggaatgaggttaat

SEQ ID NO: 4898 - RNA, 22 nt, synthetic construct
  source 1..22: mol_type = other RNA
attacagatttttacacatact

SEQ ID NO: 4899 - RNA, 22 nt, synthetic construct
  source 1..22: mol_type = other RNA
attacagtaagaatgaacatat

SEQ ID NO: 4900 - RNA, 22 nt, synthetic construct
  source 1..22: mol_type = other RNA
attaccagtcctctgtatttag

SEQ ID NO: 4901 - RNA, 22 nt, synthetic construct
  source 1..22: mol_type = other RNA
attagaatcacagcatatttag

SEQ ID NO: 4902 - RNA, 22 nt, synthetic construct
  source 1..22: mol_type = other RNA
attagaccacattaacttggaa

SEQ ID NO: 4903 - RNA, 22 nt, synthetic construct
  source 1..22: mol_type = other RNA
attagctcatatgatgcctttt

SEQ ID NO: 4904 - RNA, 22 nt, synthetic construct
  source 1..22: mol_type = other RNA
attataatcaataggtgaactt

SEQ ID NO: 4905 - RNA, 22 nt, synthetic construct
  source 1..22: mol_type = other RNA
attataatctagattgtgacca

SEQ ID NO: 4906 - RNA, 22 nt, synthetic construct
  source 1..22: mol_type = other RNA
attatccaatatacatgtcata

SEQ ID NO: 4907 - RNA, 22 nt, synthetic construct
  source 1..22: mol_type = other RNA
attattagaccacattaacttg

SEQ ID NO: 4908 - RNA, 22 nt, synthetic construct
  source 1..22: mol_type = other RNA
attattcttgcatgtttatcga

SEQ ID NO: 4909 - RNA, 22 nt, synthetic construct
  source 1..22: mol_type = other RNA
attattttgtacttttctggaa

SEQ ID NO: 4910 - RNA, 22 nt, synthetic construct
  source 1..22: mol_type = other RNA
attattttgtagcaaaatgaag

SEQ ID NO: 4911 - RNA, 22 nt, synthetic construct
  source 1..22: mol_type = other RNA
attcaataaacaaagacccagt

SEQ ID NO: 4912 - RNA, 22 nt, synthetic construct
  source 1..22: mol_type = other RNA
attcacatagatcatacatatc

SEQ ID NO: 4913 - RNA, 22 nt, synthetic construct
  source 1..22: mol_type = other RNA
attccaagttaatgtggtctaa

SEQ ID NO: 4914 - RNA, 22 nt, synthetic construct
  source 1..22: mol_type = other RNA
attcccacatcacaaaatttaa

SEQ ID NO: 4915 - RNA, 22 nt, synthetic construct
  source 1..22: mol_type = other RNA
attcgtgtaggttttcaagtag

SEQ ID NO: 4916 - RNA, 22 nt, synthetic construct
  source 1..22: mol_type = other RNA
attctaatacattcgtgtaggt

SEQ ID NO: 4917 - RNA, 22 nt, synthetic construct
  source 1..22: mol_type = other RNA
attctgacaagtgatactgtgg

SEQ ID NO: 4918 - RNA, 22 nt, synthetic construct
  source 1..22: mol_type = other RNA
attctgcttcattaggtttcat

SEQ ID NO: 4919 - RNA, 22 nt, synthetic construct
  source 1..22: mol_type = other RNA
attcttactgtaatctgacaag

SEQ ID NO: 4920 - RNA, 22 nt, synthetic construct
  source 1..22: mol_type = other RNA
attcttgcatgtttatcgacat

SEQ ID NO: 4921 - RNA, 22 nt, synthetic construct
  source 1..22: mol_type = other RNA
attctttaaggttatgtgattg

SEQ ID NO: 4922 - RNA, 22 nt, synthetic construct
  source 1..22: mol_type = other RNA
attgacaaaggtaggtcaccat

SEQ ID NO: 4923 - RNA, 22 nt, synthetic construct
  source 1..22: mol_type = other RNA
attgactttaacatgaggtatc

SEQ ID NO: 4924 - RNA, 22 nt, synthetic construct
  source 1..22: mol_type = other RNA
attgagaaatgtaaacggtatt

SEQ ID NO: 4925 - RNA, 22 nt, synthetic construct
  source 1..22: mol_type = other RNA
attgattataatctagattgtg

SEQ ID NO: 4926 - RNA, 22 nt, synthetic construct
  source 1..22: mol_type = other RNA
attgattcccacatcacaaaat

SEQ ID NO: 4927 - RNA, 22 nt, synthetic construct
  source 1..22: mol_type = other RNA
attggacaatttcaaatgcaaa

SEQ ID NO: 4928 - RNA, 22 nt, synthetic construct
  source 1..22: mol_type = other RNA
attgtaaaggaatcttgtcaga

SEQ ID NO: 4929 - RNA, 22 nt, synthetic construct
  source 1..22: mol_type = other RNA
attgtacagttcttaaatgttg

SEQ ID NO: 4930 - RNA, 22 nt, synthetic construct
  source 1..22: mol_type = other RNA
attgtccaattttgggggaaga

SEQ ID NO: 4931 - RNA, 22 nt, synthetic construct
  source 1..22: mol_type = other RNA
attgtgaccatctaaaattgat

SEQ ID NO: 4932 - RNA, 22 nt, synthetic construct
  source 1..22: mol_type = other RNA
atttaaaatttcttactggcag

SEQ ID NO: 4933 - RNA, 22 nt, synthetic construct
  source 1..22: mol_type = other RNA
atttaaacattaacctcattcc

SEQ ID NO: 4934 - RNA, 22 nt, synthetic construct
  source 1..22: mol_type = other RNA
atttaagaactgtacaattacc

SEQ ID NO: 4935 - RNA, 22 nt, synthetic construct
  source 1..22: mol_type = other RNA
atttaataagttcacctattga

SEQ ID NO: 4936 - RNA, 22 nt, synthetic construct
  source 1..22: mol_type = other RNA
atttaataccagattattagac

SEQ ID NO: 4937 - RNA, 22 nt, synthetic construct
  source 1..22: mol_type = other RNA
atttaatatatgagttgcttcc

SEQ ID NO: 4938 - RNA, 22 nt, synthetic construct
  source 1..22: mol_type = other RNA
atttaattctgcttcattaggt

SEQ ID NO: 4939 - RNA, 22 nt, synthetic construct
  source 1..22: mol_type = other RNA
atttacttaggattcacataga

SEQ ID NO: 4940 - RNA, 22 nt, synthetic construct
  source 1..22: mol_type = other RNA
atttagggactgggtctttgtt

SEQ ID NO: 4941 - RNA, 22 nt, synthetic construct
  source 1..22: mol_type = other RNA
atttagggatctgttgtgatgt

SEQ ID NO: 4942 - RNA, 22 nt, synthetic construct
  source 1..22: mol_type = other RNA
atttagggatttagggatctgt

SEQ ID NO: 4943 - RNA, 22 nt, synthetic construct
  source 1..22: mol_type = other RNA
atttaggggaaatataaacttt

SEQ ID NO: 4944 - RNA, 22 nt, synthetic construct
  source 1..22: mol_type = other RNA
atttagtcaagtttagagtttt

SEQ ID NO: 4945 - RNA, 22 nt, synthetic construct
  source 1..22: mol_type = other RNA
atttatgaaacctaatgaagca

SEQ ID NO: 4946 - RNA, 22 nt, synthetic construct
  source 1..22: mol_type = other RNA
atttcaaaactaaaaatcgtca

SEQ ID NO: 4947 - RNA, 22 nt, synthetic construct
  source 1..22: mol_type = other RNA
atttcccctaaatatgctgtga

SEQ ID NO: 4948 - RNA, 22 nt, synthetic construct
  source 1..22: mol_type = other RNA
atttcgacagcttagtctgtgg

SEQ ID NO: 4949 - RNA, 22 nt, synthetic construct
  source 1..22: mol_type = other RNA
atttctacttgaaaacctacac

SEQ ID NO: 4950 - RNA, 22 nt, synthetic construct
  source 1..22: mol_type = other RNA
atttctataatttagggactgg

SEQ ID NO: 4951 - RNA, 22 nt, synthetic construct
  source 1..22: mol_type = other RNA
atttctcaagctttctcttaag

SEQ ID NO: 4952 - RNA, 22 nt, synthetic construct
  source 1..22: mol_type = other RNA
atttcttactggcagttttaaa

SEQ ID NO: 4953 - RNA, 22 nt, synthetic construct
  source 1..22: mol_type = other RNA
atttgaaatacataatgctaag

SEQ ID NO: 4954 - RNA, 22 nt, synthetic construct
  source 1..22: mol_type = other RNA
atttgaaattgtccaattttgg

SEQ ID NO: 4955 - RNA, 22 nt, synthetic construct
  source 1..22: mol_type = other RNA
atttggagtaaatgtttgatat

SEQ ID NO: 4956 - RNA, 22 nt, synthetic construct
  source 1..22: mol_type = other RNA
atttgtatctaatctttaggga

SEQ ID NO: 4957 - RNA, 22 nt, synthetic construct
  source 1..22: mol_type = other RNA
atttgtggcatcgagttaaagt

SEQ ID NO: 4958 - RNA, 22 nt, synthetic construct
  source 1..22: mol_type = other RNA
atttgttaaaggatatagtgcc

SEQ ID NO: 4959 - RNA, 22 nt, synthetic construct
  source 1..22: mol_type = other RNA
atttgtttaaagacagcgaact

SEQ ID NO: 4960 - RNA, 22 nt, synthetic construct
  source 1..22: mol_type = other RNA
attttaaaaggcatcatatgag

SEQ ID NO: 4961 - RNA, 22 nt, synthetic construct
  source 1..22: mol_type = other RNA
attttagatggtcacaatctag

SEQ ID NO: 4962 - RNA, 22 nt, synthetic construct
  source 1..22: mol_type = other RNA
attttcaggaccacagactaag

SEQ ID NO: 4963 - RNA, 22 nt, synthetic construct
  source 1..22: mol_type = other RNA
attttgattgagaaatgtaaac

SEQ ID NO: 4964 - RNA, 22 nt, synthetic construct
  source 1..22: mol_type = other RNA
attttgcatttgaaattgtcca

SEQ ID NO: 4965 - RNA, 22 nt, synthetic construct
  source 1..22: mol_type = other RNA
attttgctacaaaataatttgg

SEQ ID NO: 4966 - RNA, 22 nt, synthetic construct
  source 1..22: mol_type = other RNA
attttgggggaagagaggagcc

SEQ ID NO: 4967 - RNA, 22 nt, synthetic construct
  source 1..22: mol_type = other RNA
attttggtattctggccctaaa

SEQ ID NO: 4968 - RNA, 22 nt, synthetic construct
  source 1..22: mol_type = other RNA
attttgtacttttctggaacaa

SEQ ID NO: 4969 - RNA, 22 nt, synthetic construct
  source 1..22: mol_type = other RNA
attttgtagcaaaatgaagcat

SEQ ID NO: 4970 - RNA, 22 nt, synthetic construct
  source 1..22: mol_type = other RNA
attttgtgatgtgggaatcaat

SEQ ID NO: 4971 - RNA, 22 nt, synthetic construct
  source 1..22: mol_type = other RNA
attttgttccagaaaagtacaa

SEQ ID NO: 4972 - RNA, 22 nt, synthetic construct
  source 1..22: mol_type = other RNA
atttttaaactgatgcttcatt

SEQ ID NO: 4973 - RNA, 22 nt, synthetic construct
  source 1..22: mol_type = other RNA
atttttacacatactctgtgct

SEQ ID NO: 4974 - RNA, 22 nt, synthetic construct
  source 1..22: mol_type = other RNA
attttttaaaactgccagtaag

SEQ ID NO: 4975 - RNA, 22 nt, synthetic construct
  source 1..22: mol_type = other RNA
attttttaccacagtatcactt

SEQ ID NO: 4976 - RNA, 22 nt, synthetic construct
  source 1..22: mol_type = other RNA
caaaactaaaaatcgtcagcac

SEQ ID NO: 4977 - RNA, 22 nt, synthetic construct
  source 1..22: mol_type = other RNA
caaaataatttggagtaaatgt

SEQ ID NO: 4978 - RNA, 22 nt, synthetic construct
  source 1..22: mol_type = other RNA
caaaatatttacttaggattca

SEQ ID NO: 4979 - RNA, 22 nt, synthetic construct
  source 1..22: mol_type = other RNA
caaaatgaagcatcagtttaaa

SEQ ID NO: 4980 - RNA, 22 nt, synthetic construct
  source 1..22: mol_type = other RNA
caaaatggctcctctcttcccc

SEQ ID NO: 4981 - RNA, 22 nt, synthetic construct
  source 1..22: mol_type = other RNA
caaaattggacaatttcaaatg

SEQ ID NO: 4982 - RNA, 22 nt, synthetic construct
  source 1..22: mol_type = other RNA
caaacatttactccaaattatt

SEQ ID NO: 4983 - RNA, 22 nt, synthetic construct
  source 1..22: mol_type = other RNA
caaagacccagtccctaaatta

SEQ ID NO: 4984 - RNA, 22 nt, synthetic construct
  source 1..22: mol_type = other RNA
caaaggtaggtcaccatataac

SEQ ID NO: 4985 - RNA, 22 nt, synthetic construct
  source 1..22: mol_type = other RNA
caaataaggtatagtgatacct

SEQ ID NO: 4986 - RNA, 22 nt, synthetic construct
  source 1..22: mol_type = other RNA
caaataattgtaaaggaatctt

SEQ ID NO: 4987 - RNA, 22 nt, synthetic construct
  source 1..22: mol_type = other RNA
caaatagaggaagcaactcata

SEQ ID NO: 4988 - RNA, 22 nt, synthetic construct
  source 1..22: mol_type = other RNA
caaatatgttcattcttactgt

SEQ ID NO: 4989 - RNA, 22 nt, synthetic construct
  source 1..22: mol_type = other RNA
caaatggagatgactactaagt

SEQ ID NO: 4990 - RNA, 22 nt, synthetic construct
  source 1..22: mol_type = other RNA
caaattatccaatatacatgtc

SEQ ID NO: 4991 - RNA, 22 nt, synthetic construct
  source 1..22: mol_type = other RNA
caaattattttgtagcaaaatg

SEQ ID NO: 4992 - RNA, 22 nt, synthetic construct
  source 1..22: mol_type = other RNA
caaatttttaaactgatgcttc

SEQ ID NO: 4993 - RNA, 22 nt, synthetic construct
  source 1..22: mol_type = other RNA
caaattttttaccacagtatca

SEQ ID NO: 4994 - RNA, 22 nt, synthetic construct
  source 1..22: mol_type = other RNA
caacagatccctaaatccctaa

SEQ ID NO: 4995 - RNA, 22 nt, synthetic construct
  source 1..22: mol_type = other RNA
caacatttaagaactgtacaat

SEQ ID NO: 4996 - RNA, 22 nt, synthetic construct
  source 1..22: mol_type = other RNA
caactttcccagtttaaaaaac

SEQ ID NO: 4997 - RNA, 22 nt, synthetic construct
  source 1..22: mol_type = other RNA
caagagtactagttttttaaac

SEQ ID NO: 4998 - RNA, 22 nt, synthetic construct
  source 1..22: mol_type = other RNA
caagattcctttacaattattt

SEQ ID NO: 4999 - RNA, 22 nt, synthetic construct
  source 1..22: mol_type = other RNA
caagcatgtatatatgtttaaa

SEQ ID NO: 5000 - RNA, 22 nt, synthetic construct
  source 1..22: mol_type = other RNA
caagctttctcttaaggattta

SEQ ID NO: 5001 - RNA, 22 nt, synthetic construct
  source 1..22: mol_type = other RNA
caagtagaaataaacctcgtaa

SEQ ID NO: 5002 - RNA, 22 nt, synthetic construct
  source 1..22: mol_type = other RNA
caagtgatactgtggtaaaaaa

SEQ ID NO: 5003 - RNA, 22 nt, synthetic construct
  source 1..22: mol_type = other RNA
caagttaatgtggtctaataat

SEQ ID NO: 5004 - RNA, 22 nt, synthetic construct
  source 1..22: mol_type = other RNA
caagttactgaacgtttaaaca

SEQ ID NO: 5005 - RNA, 22 nt, synthetic construct
  source 1..22: mol_type = other RNA
caagttatatggtgacctacct

SEQ ID NO: 5006 - RNA, 22 nt, synthetic construct
  source 1..22: mol_type = other RNA
caagtttagagttttaacaaga

SEQ ID NO: 5007 - RNA, 22 nt, synthetic construct
  source 1..22: mol_type = other RNA
caataaacaaagacccagtccc

SEQ ID NO: 5008 - RNA, 22 nt, synthetic construct
  source 1..22: mol_type = other RNA
caataatttaaacattaacctc

SEQ ID NO: 5009 - RNA, 22 nt, synthetic construct
  source 1..22: mol_type = other RNA
caatacttagcattatgtattt

SEQ ID NO: 5010 - RNA, 22 nt, synthetic construct
  source 1..22: mol_type = other RNA
caataggtgaacttattaaata

SEQ ID NO: 5011 - RNA, 22 nt, synthetic construct
  source 1..22: mol_type = other RNA
caatcacataaccttaaagaat

SEQ ID NO: 5012 - RNA, 22 nt, synthetic construct
  source 1..22: mol_type = other RNA
caatctagattataatcaatag

SEQ ID NO: 5013 - RNA, 22 nt, synthetic construct
  source 1..22: mol_type = other RNA
caatgtgacttagtagtcatct

SEQ ID NO: 5014 - RNA, 22 nt, synthetic construct
  source 1..22: mol_type = other RNA
caattaccagtcctctgtattt

SEQ ID NO: 5015 - RNA, 22 nt, synthetic construct
  source 1..22: mol_type = other RNA
caattttagatggtcacaatct

SEQ ID NO: 5016 - RNA, 22 nt, synthetic construct
  source 1..22: mol_type = other RNA
caattttgggggaagagaggag

SEQ ID NO: 5017 - RNA, 22 nt, synthetic construct
  source 1..22: mol_type = other RNA
cacaaatatgttcattcttact

SEQ ID NO: 5018 - RNA, 22 nt, synthetic construct
  source 1..22: mol_type = other RNA
cacaacagatccctaaatccct

SEQ ID NO: 5019 - RNA, 22 nt, synthetic construct
  source 1..22: mol_type = other RNA
cacaactttcccagtttaaaaa

SEQ ID NO: 5020 - RNA, 22 nt, synthetic construct
  source 1..22: mol_type = other RNA
cacaatctagattataatcaat

SEQ ID NO: 5021 - RNA, 22 nt, synthetic construct
  source 1..22: mol_type = other RNA
cacagactaagctgtcgaaatt

SEQ ID NO: 5022 - RNA, 22 nt, synthetic construct
  source 1..22: mol_type = other RNA
cacagagtatgtgtaaaaatct

SEQ ID NO: 5023 - RNA, 22 nt, synthetic construct
  source 1..22: mol_type = other RNA
cacagcatatttaggggaaata

SEQ ID NO: 5024 - RNA, 22 nt, synthetic construct
  source 1..22: mol_type = other RNA
cacagtatcacttgtcagaatt

SEQ ID NO: 5025 - RNA, 22 nt, synthetic construct
  source 1..22: mol_type = other RNA
cacataaccttaaagaataccg

SEQ ID NO: 5026 - RNA, 22 nt, synthetic construct
  source 1..22: mol_type = other RNA
cacatactctgtgctgacgatt

SEQ ID NO: 5027 - RNA, 22 nt, synthetic construct
  source 1..22: mol_type = other RNA
cacatagatcatacatatcttt

SEQ ID NO: 5028 - RNA, 22 nt, synthetic construct
  source 1..22: mol_type = other RNA
cacatcacaaaatttaaaacaa

SEQ ID NO: 5029 - RNA, 22 nt, synthetic construct
  source 1..22: mol_type = other RNA
cacattaacttggaatgaggtt

SEQ ID NO: 5030 - RNA, 22 nt, synthetic construct
  source 1..22: mol_type = other RNA
cacattgactttaacatgaggt

SEQ ID NO: 5031 - RNA, 22 nt, synthetic construct
  source 1..22: mol_type = other RNA
caccatataacttgggcactat

SEQ ID NO: 5032 - RNA, 22 nt, synthetic construct
  source 1..22: mol_type = other RNA
cacctattgattataatctaga

SEQ ID NO: 5033 - RNA, 22 nt, synthetic construct
  source 1..22: mol_type = other RNA
cacgaatgtattagaatcacag

SEQ ID NO: 5034 - RNA, 22 nt, synthetic construct
  source 1..22: mol_type = other RNA
cactataccttatttgttaaaa

SEQ ID NO: 5035 - RNA, 22 nt, synthetic construct
  source 1..22: mol_type = other RNA
cactatatcctttaacaaatgg

SEQ ID NO: 5036 - RNA, 22 nt, synthetic construct
  source 1..22: mol_type = other RNA
cactgtctatttaagattaaac

SEQ ID NO: 5037 - RNA, 22 nt, synthetic construct
  source 1..22: mol_type = other RNA
cacttaatactatgaaaacaaa

SEQ ID NO: 5038 - RNA, 22 nt, synthetic construct
  source 1..22: mol_type = other RNA
cacttgtcagaatttattttta

SEQ ID NO: 5039 - RNA, 22 nt, synthetic construct
  source 1..22: mol_type = other RNA
cagaataccaaaatggctcctc

SEQ ID NO: 5040 - RNA, 22 nt, synthetic construct
  source 1..22: mol_type = other RNA
cagactaagctgtcgaaattaa

SEQ ID NO: 5041 - RNA, 22 nt, synthetic construct
  source 1..22: mol_type = other RNA
cagaggactggtaattgtacag

SEQ ID NO: 5042 - RNA, 22 nt, synthetic construct
  source 1..22: mol_type = other RNA
cagagtatgtgtaaaaatctgt

SEQ ID NO: 5043 - RNA, 22 nt, synthetic construct
  source 1..22: mol_type = other RNA
cagatccctaaatccctaaatc

SEQ ID NO: 5044 - RNA, 22 nt, synthetic construct
  source 1..22: mol_type = other RNA
cagattacagtaagaatgaaca

SEQ ID NO: 5045 - RNA, 22 nt, synthetic construct
  source 1..22: mol_type = other RNA
cagattattagaccacattaac

SEQ ID NO: 5046 - RNA, 22 nt, synthetic construct
  source 1..22: mol_type = other RNA
cagatttttacacatactctgt

SEQ ID NO: 5047 - RNA, 22 nt, synthetic construct
  source 1..22: mol_type = other RNA
cagcacagagtatgtgtaaaaa

SEQ ID NO: 5048 - RNA, 22 nt, synthetic construct
  source 1..22: mol_type = other RNA
cagcatatttaggggaaatata

SEQ ID NO: 5049 - RNA, 22 nt, synthetic construct
  source 1..22: mol_type = other RNA
cagcctgacaagcatgtatata

SEQ ID NO: 5050 - RNA, 22 nt, synthetic construct
  source 1..22: mol_type = other RNA
cagcgaacttattttaatacag

SEQ ID NO: 5051 - RNA, 22 nt, synthetic construct
  source 1..22: mol_type = other RNA
cagcgttaatttcgacagctta

SEQ ID NO: 5052 - RNA, 22 nt, synthetic construct
  source 1..22: mol_type = other RNA
cagcttagtctgtggtcctgaa

SEQ ID NO: 5053 - RNA, 22 nt, synthetic construct
  source 1..22: mol_type = other RNA
caggaccacagactaagctgtc

SEQ ID NO: 5054 - RNA, 22 nt, synthetic construct
  source 1..22: mol_type = other RNA
caggctgtttaaacgttcagta

SEQ ID NO: 5055 - RNA, 22 nt, synthetic construct
  source 1..22: mol_type = other RNA
cagtaacttgttacgaggttta

SEQ ID NO: 5056 - RNA, 22 nt, synthetic construct
  source 1..22: mol_type = other RNA
cagtaagaatgaacatatttgt

SEQ ID NO: 5057 - RNA, 22 nt, synthetic construct
  source 1..22: mol_type = other RNA
cagtatcacttgtcagaattta

SEQ ID NO: 5058 - RNA, 22 nt, synthetic construct
  source 1..22: mol_type = other RNA
cagtatttaattctgcttcatt

SEQ ID NO: 5059 - RNA, 22 nt, synthetic construct
  source 1..22: mol_type = other RNA
cagtccctaaattatagaaatt

SEQ ID NO: 5060 - RNA, 22 nt, synthetic construct
  source 1..22: mol_type = other RNA
cagtcctctgtatttagtcaag

SEQ ID NO: 5061 - RNA, 22 nt, synthetic construct
  source 1..22: mol_type = other RNA
cagttcttaaatgttgtagtat

SEQ ID NO: 5062 - RNA, 22 nt, synthetic construct
  source 1..22: mol_type = other RNA
cagtttaaaaaactagtactct

SEQ ID NO: 5063 - RNA, 22 nt, synthetic construct
  source 1..22: mol_type = other RNA
cataaccttaaagaataccgtt

SEQ ID NO: 5064 - RNA, 22 nt, synthetic construct
  source 1..22: mol_type = other RNA
cataatgctaagtattgacaaa

SEQ ID NO: 5065 - RNA, 22 nt, synthetic construct
  source 1..22: mol_type = other RNA
catacaatcacataaccttaaa

SEQ ID NO: 5066 - RNA, 22 nt, synthetic construct
  source 1..22: mol_type = other RNA
catactctgtgctgacgatttt

SEQ ID NO: 5067 - RNA, 22 nt, synthetic construct
  source 1..22: mol_type = other RNA
catagatcatacatatctttta

SEQ ID NO: 5068 - RNA, 22 nt, synthetic construct
  source 1..22: mol_type = other RNA
catataacttgggcactatatc

SEQ ID NO: 5069 - RNA, 22 nt, synthetic construct
  source 1..22: mol_type = other RNA
catatatacatgcttgtcaggc

SEQ ID NO: 5070 - RNA, 22 nt, synthetic construct
  source 1..22: mol_type = other RNA
catatcaaacatttactccaaa

SEQ ID NO: 5071 - RNA, 22 nt, synthetic construct
  source 1..22: mol_type = other RNA
catatcttttatatatgtgaca

SEQ ID NO: 5072 - RNA, 22 nt, synthetic construct
  source 1..22: mol_type = other RNA
catatgagctaatatcacaact

SEQ ID NO: 5073 - RNA, 22 nt, synthetic construct
  source 1..22: mol_type = other RNA
catatgatgccttttaaaataa

SEQ ID NO: 5074 - RNA, 22 nt, synthetic construct
  source 1..22: mol_type = other RNA
catatttaggggaaatataaac

SEQ ID NO: 5075 - RNA, 22 nt, synthetic construct
  source 1..22: mol_type = other RNA
catatttgtggcatcgagttaa

SEQ ID NO: 5076 - RNA, 22 nt, synthetic construct
  source 1..22: mol_type = other RNA
catcacaacagatccctaaatc

SEQ ID NO: 5077 - RNA, 22 nt, synthetic construct
  source 1..22: mol_type = other RNA
catcatatgagctaatatcaca

SEQ ID NO: 5078 - RNA, 22 nt, synthetic construct
  source 1..22: mol_type = other RNA
catcgagttaaagtttatattt

SEQ ID NO: 5079 - RNA, 22 nt, synthetic construct
  source 1..22: mol_type = other RNA
catctaaaattgattcccacat

SEQ ID NO: 5080 - RNA, 22 nt, synthetic construct
  source 1..22: mol_type = other RNA
catctccatttgtttaaagaca

SEQ ID NO: 5081 - RNA, 22 nt, synthetic construct
  source 1..22: mol_type = other RNA
catgaggtatcactatacctta

SEQ ID NO: 5082 - RNA, 22 nt, synthetic construct
  source 1..22: mol_type = other RNA
catgcttgtcaggctgtttaaa

SEQ ID NO: 5083 - RNA, 22 nt, synthetic construct
  source 1..22: mol_type = other RNA
catgtatattggataatttgaa

SEQ ID NO: 5084 - RNA, 22 nt, synthetic construct
  source 1..22: mol_type = other RNA
catgttaaagtcaatgtgactt

SEQ ID NO: 5085 - RNA, 22 nt, synthetic construct
  source 1..22: mol_type = other RNA
catgtttatcgacatcacaaca

SEQ ID NO: 5086 - RNA, 22 nt, synthetic construct
  source 1..22: mol_type = other RNA
cattaacctcattccaagttaa

SEQ ID NO: 5087 - RNA, 22 nt, synthetic construct
  source 1..22: mol_type = other RNA
cattaacttggaatgaggttaa

SEQ ID NO: 5088 - RNA, 22 nt, synthetic construct
  source 1..22: mol_type = other RNA
cattaggtttcataaataaatc

SEQ ID NO: 5089 - RNA, 22 nt, synthetic construct
  source 1..22: mol_type = other RNA
cattatgtatttcaaattatcc

SEQ ID NO: 5090 - RNA, 22 nt, synthetic construct
  source 1..22: mol_type = other RNA
cattatttaatatatgagttgc

SEQ ID NO: 5091 - RNA, 22 nt, synthetic construct
  source 1..22: mol_type = other RNA
cattccaagttaatgtggtcta

SEQ ID NO: 5092 - RNA, 22 nt, synthetic construct
  source 1..22: mol_type = other RNA
cattcgtgtaggttttcaagta

SEQ ID NO: 5093 - RNA, 22 nt, synthetic construct
  source 1..22: mol_type = other RNA
cattcttactgtaatctgacaa

SEQ ID NO: 5094 - RNA, 22 nt, synthetic construct
  source 1..22: mol_type = other RNA
cattgactttaacatgaggtat

SEQ ID NO: 5095 - RNA, 22 nt, synthetic construct
  source 1..22: mol_type = other RNA
catttaagaactgtacaattac

SEQ ID NO: 5096 - RNA, 22 nt, synthetic construct
  source 1..22: mol_type = other RNA
catttactccaaattattttgt

SEQ ID NO: 5097 - RNA, 22 nt, synthetic construct
  source 1..22: mol_type = other RNA
catttctcaatcaaaattctta

SEQ ID NO: 5098 - RNA, 22 nt, synthetic construct
  source 1..22: mol_type = other RNA
catttgaaattgtccaattttg

SEQ ID NO: 5099 - RNA, 22 nt, synthetic construct
  source 1..22: mol_type = other RNA
catttgttaaaggatatagtgc

SEQ ID NO: 5100 - RNA, 22 nt, synthetic construct
  source 1..22: mol_type = other RNA
catttgtttaaagacagcgaac

SEQ ID NO: 5101 - RNA, 22 nt, synthetic construct
  source 1..22: mol_type = other RNA
cattttgctacaaaataatttg

SEQ ID NO: 5102 - RNA, 22 nt, synthetic construct
  source 1..22: mol_type = other RNA
cattttggtattctggccctaa

SEQ ID NO: 5103 - RNA, 22 nt, synthetic construct
  source 1..22: mol_type = other RNA
ccaaaatggctcctctcttccc

SEQ ID NO: 5104 - RNA, 22 nt, synthetic construct
  source 1..22: mol_type = other RNA
ccaaaattggacaatttcaaat

SEQ ID NO: 5105 - RNA, 22 nt, synthetic construct
  source 1..22: mol_type = other RNA
ccaaatagaggaagcaactcat

SEQ ID NO: 5106 - RNA, 22 nt, synthetic construct
  source 1..22: mol_type = other RNA
ccaaattattttgtagcaaaat

SEQ ID NO: 5107 - RNA, 22 nt, synthetic construct
  source 1..22: mol_type = other RNA
ccaagttaatgtggtctaataa

SEQ ID NO: 5108 - RNA, 22 nt, synthetic construct
  source 1..22: mol_type = other RNA
ccaagttatatggtgacctacc

SEQ ID NO: 5109 - RNA, 22 nt, synthetic construct
  source 1..22: mol_type = other RNA
ccaatatacatgtcatatatat

SEQ ID NO: 5110 - RNA, 22 nt, synthetic construct
  source 1..22: mol_type = other RNA
ccaattttgggggaagagagga

SEQ ID NO: 5111 - RNA, 22 nt, synthetic construct
  source 1..22: mol_type = other RNA
ccacaaatatgttcattcttac

SEQ ID NO: 5112 - RNA, 22 nt, synthetic construct
  source 1..22: mol_type = other RNA
ccacagactaagctgtcgaaat

SEQ ID NO: 5113 - RNA, 22 nt, synthetic construct
  source 1..22: mol_type = other RNA
ccacagtatcacttgtcagaat

SEQ ID NO: 5114 - RNA, 22 nt, synthetic construct
  source 1..22: mol_type = other RNA
ccacatcacaaaatttaaaaca

SEQ ID NO: 5115 - RNA, 22 nt, synthetic construct
  source 1..22: mol_type = other RNA
ccacattaacttggaatgaggt

SEQ ID NO: 5116 - RNA, 22 nt, synthetic construct
  source 1..22: mol_type = other RNA
ccagaaaagtacaaaataataa

SEQ ID NO: 5117 - RNA, 22 nt, synthetic construct
  source 1..22: mol_type = other RNA
ccagaataccaaaatggctcct

SEQ ID NO: 5118 - RNA, 22 nt, synthetic construct
  source 1..22: mol_type = other RNA
ccagattattagaccacattaa

SEQ ID NO: 5119 - RNA, 22 nt, synthetic construct
  source 1..22: mol_type = other RNA
ccagtccctaaattatagaaat

SEQ ID NO: 5120 - RNA, 22 nt, synthetic construct
  source 1..22: mol_type = other RNA
ccagtcctctgtatttagtcaa

SEQ ID NO: 5121 - RNA, 22 nt, synthetic construct
  source 1..22: mol_type = other RNA
ccagtttaaaaaactagtactc

SEQ ID NO: 5122 - RNA, 22 nt, synthetic construct
  source 1..22: mol_type = other RNA
ccatataacttgggcactatat

SEQ ID NO: 5123 - RNA, 22 nt, synthetic construct
  source 1..22: mol_type = other RNA
ccatctaaaattgattcccaca

SEQ ID NO: 5124 - RNA, 22 nt, synthetic construct
  source 1..22: mol_type = other RNA
ccatttgttaaaggatatagtg

SEQ ID NO: 5125 - RNA, 22 nt, synthetic construct
  source 1..22: mol_type = other RNA
ccatttgtttaaagacagcgaa

SEQ ID NO: 5126 - RNA, 22 nt, synthetic construct
  source 1..22: mol_type = other RNA
ccattttggtattctggcccta

SEQ ID NO: 5127 - RNA, 22 nt, synthetic construct
  source 1..22: mol_type = other RNA
cccaaaattggacaatttcaaa

SEQ ID NO: 5128 - RNA, 22 nt, synthetic construct
  source 1..22: mol_type = other RNA
cccaagttatatggtgacctac

SEQ ID NO: 5129 - RNA, 22 nt, synthetic construct
  source 1..22: mol_type = other RNA
cccacatcacaaaatttaaaac

SEQ ID NO: 5130 - RNA, 22 nt, synthetic construct
  source 1..22: mol_type = other RNA
cccagtccctaaattatagaaa

SEQ ID NO: 5131 - RNA, 22 nt, synthetic construct
  source 1..22: mol_type = other RNA
cccagtttaaaaaactagtact

SEQ ID NO: 5132 - RNA, 22 nt, synthetic construct
  source 1..22: mol_type = other RNA
cccatttgttaaaggatatagt

SEQ ID NO: 5133 - RNA, 22 nt, synthetic construct
  source 1..22: mol_type = other RNA
ccccaaaattggacaatttcaa

SEQ ID NO: 5134 - RNA, 22 nt, synthetic construct
  source 1..22: mol_type = other RNA
cccccaaaattggacaatttca

SEQ ID NO: 5135 - RNA, 22 nt, synthetic construct
  source 1..22: mol_type = other RNA
cccctaaatatgctgtgattct

SEQ ID NO: 5136 - RNA, 22 nt, synthetic construct
  source 1..22: mol_type = other RNA
ccctaaagattagatacaaatt

SEQ ID NO: 5137 - RNA, 22 nt, synthetic construct
  source 1..22: mol_type = other RNA
ccctaaatatgctgtgattcta

SEQ ID NO: 5138 - RNA, 22 nt, synthetic construct
  source 1..22: mol_type = other RNA
ccctaaatccctaaagattaga

SEQ ID NO: 5139 - RNA, 22 nt, synthetic construct
  source 1..22: mol_type = other RNA
ccctaaatccctaaatccctaa

SEQ ID NO: 5140 - RNA, 22 nt, synthetic construct
  source 1..22: mol_type = other RNA
ccgtttacatttctcaatcaaa

SEQ ID NO: 5141 - RNA, 22 nt, synthetic construct
  source 1..22: mol_type = other RNA
cctaaagattagatacaaattt

SEQ ID NO: 5142 - RNA, 22 nt, synthetic construct
  source 1..22: mol_type = other RNA
cctaaatatgctgtgattctaa

SEQ ID NO: 5143 - RNA, 22 nt, synthetic construct
  source 1..22: mol_type = other RNA
cctaaatccctaaagattagat

SEQ ID NO: 5144 - RNA, 22 nt, synthetic construct
  source 1..22: mol_type = other RNA
cctaaatccctaaatccctaaa

SEQ ID NO: 5145 - RNA, 22 nt, synthetic construct
  source 1..22: mol_type = other RNA
cctaagtaaatattttgttcca

SEQ ID NO: 5146 - RNA, 22 nt, synthetic construct
  source 1..22: mol_type = other RNA
cctaatgaagcagaattaaata

SEQ ID NO: 5147 - RNA, 22 nt, synthetic construct
  source 1..22: mol_type = other RNA
cctacacgaatgtattagaatc

SEQ ID NO: 5148 - RNA, 22 nt, synthetic construct
  source 1..22: mol_type = other RNA
cctacctttgtcaatacttagc

SEQ ID NO: 5149 - RNA, 22 nt, synthetic construct
  source 1..22: mol_type = other RNA
cctattgattataatctagatt

SEQ ID NO: 5150 - RNA, 22 nt, synthetic construct
  source 1..22: mol_type = other RNA
cctcatgttaaagtcaatgtga

SEQ ID NO: 5151 - RNA, 22 nt, synthetic construct
  source 1..22: mol_type = other RNA
cctcattccaagttaatgtggt

SEQ ID NO: 5152 - RNA, 22 nt, synthetic construct
  source 1..22: mol_type = other RNA
cctcgtaacaagttactgaacg

SEQ ID NO: 5153 - RNA, 22 nt, synthetic construct
  source 1..22: mol_type = other RNA
cctctcttcccccaaaattgga

SEQ ID NO: 5154 - RNA, 22 nt, synthetic construct
  source 1..22: mol_type = other RNA
cctctgtatttagtcaagttta

SEQ ID NO: 5155 - RNA, 22 nt, synthetic construct
  source 1..22: mol_type = other RNA
cctgacaagcatgtatatatgt

SEQ ID NO: 5156 - RNA, 22 nt, synthetic construct
  source 1..22: mol_type = other RNA
ccttaaagaataccgtttacat

SEQ ID NO: 5157 - RNA, 22 nt, synthetic construct
  source 1..22: mol_type = other RNA
ccttaagagaaagcttgagaaa

SEQ ID NO: 5158 - RNA, 22 nt, synthetic construct
  source 1..22: mol_type = other RNA
cctttaacaaatgggtttaatt

SEQ ID NO: 5159 - RNA, 22 nt, synthetic construct
  source 1..22: mol_type = other RNA
cctttacaattatttgttttca

SEQ ID NO: 5160 - RNA, 22 nt, synthetic construct
  source 1..22: mol_type = other RNA
cctttattattttgtacttttc

SEQ ID NO: 5161 - RNA, 22 nt, synthetic construct
  source 1..22: mol_type = other RNA
cctttgtcaatacttagcatta

SEQ ID NO: 5162 - RNA, 22 nt, synthetic construct
  source 1..22: mol_type = other RNA
ccttttaaaataaaagtctcta

SEQ ID NO: 5163 - RNA, 22 nt, synthetic construct
  source 1..22: mol_type = other RNA
cgaacttattttaatacagtat

SEQ ID NO: 5164 - RNA, 22 nt, synthetic construct
  source 1..22: mol_type = other RNA
cgaatgtattagaatcacagca

SEQ ID NO: 5165 - RNA, 22 nt, synthetic construct
  source 1..22: mol_type = other RNA
cgacagcttagtctgtggtcct

SEQ ID NO: 5166 - RNA, 22 nt, synthetic construct
  source 1..22: mol_type = other RNA
cgacatcacaacagatccctaa

SEQ ID NO: 5167 - RNA, 22 nt, synthetic construct
  source 1..22: mol_type = other RNA
cgaggtttatttctacttgaaa

SEQ ID NO: 5168 - RNA, 22 nt, synthetic construct
  source 1..22: mol_type = other RNA
cgagttaaagtttatatttccc

SEQ ID NO: 5169 - RNA, 22 nt, synthetic construct
  source 1..22: mol_type = other RNA
cgataaacatgcaagaataatt

SEQ ID NO: 5170 - RNA, 22 nt, synthetic construct
  source 1..22: mol_type = other RNA
cgatgccacaaatatgttcatt

SEQ ID NO: 5171 - RNA, 22 nt, synthetic construct
  source 1..22: mol_type = other RNA
cgctgtctttaaacaaatggag

SEQ ID NO: 5172 - RNA, 22 nt, synthetic construct
  source 1..22: mol_type = other RNA
cggtattctttaaggttatgtg

SEQ ID NO: 5173 - RNA, 22 nt, synthetic construct
  source 1..22: mol_type = other RNA
cgtaacaagttactgaacgttt

SEQ ID NO: 5174 - RNA, 22 nt, synthetic construct
  source 1..22: mol_type = other RNA
cgtcagcacagagtatgtgtaa

SEQ ID NO: 5175 - RNA, 22 nt, synthetic construct
  source 1..22: mol_type = other RNA
cgtgtaggttttcaagtagaaa

SEQ ID NO: 5176 - RNA, 22 nt, synthetic construct
  source 1..22: mol_type = other RNA
cgttaatttcgacagcttagtc

SEQ ID NO: 5177 - RNA, 22 nt, synthetic construct
  source 1..22: mol_type = other RNA
cgttcagtaacttgttacgagg

SEQ ID NO: 5178 - RNA, 22 nt, synthetic construct
  source 1..22: mol_type = other RNA
cgtttaaacagcctgacaagca

SEQ ID NO: 5179 - RNA, 22 nt, synthetic construct
  source 1..22: mol_type = other RNA
cgtttacatttctcaatcaaaa

SEQ ID NO: 5180 - RNA, 22 nt, synthetic construct
  source 1..22: mol_type = other RNA
ctaaaaatcgtcagcacagagt

SEQ ID NO: 5181 - RNA, 22 nt, synthetic construct
  source 1..22: mol_type = other RNA
ctaaaattgattcccacatcac

SEQ ID NO: 5182 - RNA, 22 nt, synthetic construct
  source 1..22: mol_type = other RNA
ctaaacttgactaaatacagag

SEQ ID NO: 5183 - RNA, 22 nt, synthetic construct
  source 1..22: mol_type = other RNA
ctaaatacagaggactggtaat

SEQ ID NO: 5184 - RNA, 22 nt, synthetic construct
  source 1..22: mol_type = other RNA
ctaaatatgctgtgattctaat

SEQ ID NO: 5185 - RNA, 22 nt, synthetic construct
  source 1..22: mol_type = other RNA
ctaaatccctaaagattagata

SEQ ID NO: 5186 - RNA, 22 nt, synthetic construct
  source 1..22: mol_type = other RNA
ctaaatccctaaatccctaaag

SEQ ID NO: 5187 - RNA, 22 nt, synthetic construct
  source 1..22: mol_type = other RNA
ctaagctgtcgaaattaacgct

SEQ ID NO: 5188 - RNA, 22 nt, synthetic construct
  source 1..22: mol_type = other RNA
ctaagtaaatattttgttccag

SEQ ID NO: 5189 - RNA, 22 nt, synthetic construct
  source 1..22: mol_type = other RNA
ctaagtattgacaaaggtaggt

SEQ ID NO: 5190 - RNA, 22 nt, synthetic construct
  source 1..22: mol_type = other RNA
ctaagtcacattgactttaaca

SEQ ID NO: 5191 - RNA, 22 nt, synthetic construct
  source 1..22: mol_type = other RNA
ctaataatctggtattaaatcc

SEQ ID NO: 5192 - RNA, 22 nt, synthetic construct
  source 1..22: mol_type = other RNA
ctaatacattcgtgtaggtttt

SEQ ID NO: 5193 - RNA, 22 nt, synthetic construct
  source 1..22: mol_type = other RNA
ctaatatcacaactttcccagt

SEQ ID NO: 5194 - RNA, 22 nt, synthetic construct
  source 1..22: mol_type = other RNA
ctaatctttagggatttaggga

SEQ ID NO: 5195 - RNA, 22 nt, synthetic construct
  source 1..22: mol_type = other RNA
ctaatgaagcagaattaaatac

SEQ ID NO: 5196 - RNA, 22 nt, synthetic construct
  source 1..22: mol_type = other RNA
ctacaaaataatttggagtaaa

SEQ ID NO: 5197 - RNA, 22 nt, synthetic construct
  source 1..22: mol_type = other RNA
ctacaacatttaagaactgtac

SEQ ID NO: 5198 - RNA, 22 nt, synthetic construct
  source 1..22: mol_type = other RNA
ctacacgaatgtattagaatca

SEQ ID NO: 5199 - RNA, 22 nt, synthetic construct
  source 1..22: mol_type = other RNA
ctacctttgtcaatacttagca

SEQ ID NO: 5200 - RNA, 22 nt, synthetic construct
  source 1..22: mol_type = other RNA
ctactaagtcacattgacttta

SEQ ID NO: 5201 - RNA, 22 nt, synthetic construct
  source 1..22: mol_type = other RNA
ctacttgaaaacctacacgaat

SEQ ID NO: 5202 - RNA, 22 nt, synthetic construct
  source 1..22: mol_type = other RNA
ctagattataatcaataggtga

SEQ ID NO: 5203 - RNA, 22 nt, synthetic construct
  source 1..22: mol_type = other RNA
ctagattgtgaccatctaaaat

SEQ ID NO: 5204 - RNA, 22 nt, synthetic construct
  source 1..22: mol_type = other RNA
ctagtactcttgttaaaactct

SEQ ID NO: 5205 - RNA, 22 nt, synthetic construct
  source 1..22: mol_type = other RNA
ctagttttttaaactgggaaag

SEQ ID NO: 5206 - RNA, 22 nt, synthetic construct
  source 1..22: mol_type = other RNA
ctataatttagggactgggtct

SEQ ID NO: 5207 - RNA, 22 nt, synthetic construct
  source 1..22: mol_type = other RNA
ctataattttcaggaccacaga

SEQ ID NO: 5208 - RNA, 22 nt, synthetic construct
  source 1..22: mol_type = other RNA
ctatatcctttaacaaatgggt

SEQ ID NO: 5209 - RNA, 22 nt, synthetic construct
  source 1..22: mol_type = other RNA
ctatgtgaatcctaagtaaata

SEQ ID NO: 5210 - RNA, 22 nt, synthetic construct
  source 1..22: mol_type = other RNA
ctattgattataatctagattg

SEQ ID NO: 5211 - RNA, 22 nt, synthetic construct
  source 1..22: mol_type = other RNA
ctatttctcaagctttctctta

SEQ ID NO: 5212 - RNA, 22 nt, synthetic construct
  source 1..22: mol_type = other RNA
ctcaagctttctcttaaggatt

SEQ ID NO: 5213 - RNA, 22 nt, synthetic construct
  source 1..22: mol_type = other RNA
ctcatatgatgccttttaaaat

SEQ ID NO: 5214 - RNA, 22 nt, synthetic construct
  source 1..22: mol_type = other RNA
ctcatgttaaagtcaatgtgac

SEQ ID NO: 5215 - RNA, 22 nt, synthetic construct
  source 1..22: mol_type = other RNA
ctcattccaagttaatgtggtc

SEQ ID NO: 5216 - RNA, 22 nt, synthetic construct
  source 1..22: mol_type = other RNA
ctccaaattattttgtagcaaa

SEQ ID NO: 5217 - RNA, 22 nt, synthetic construct
  source 1..22: mol_type = other RNA
ctccatttgtttaaagacagcg

SEQ ID NO: 5218 - RNA, 22 nt, synthetic construct
  source 1..22: mol_type = other RNA
ctcctctcttcccccaaaattg

SEQ ID NO: 5219 - RNA, 22 nt, synthetic construct
  source 1..22: mol_type = other RNA
ctcgatgccacaaatatgttca

SEQ ID NO: 5220 - RNA, 22 nt, synthetic construct
  source 1..22: mol_type = other RNA
ctcgtaacaagttactgaacgt

SEQ ID NO: 5221 - RNA, 22 nt, synthetic construct
  source 1..22: mol_type = other RNA
ctctaaacttgactaaatacag

SEQ ID NO: 5222 - RNA, 22 nt, synthetic construct
  source 1..22: mol_type = other RNA
ctctcttcccccaaaattggac

SEQ ID NO: 5223 - RNA, 22 nt, synthetic construct
  source 1..22: mol_type = other RNA
ctctgtatttagtcaagtttag

SEQ ID NO: 5224 - RNA, 22 nt, synthetic construct
  source 1..22: mol_type = other RNA
ctctgtgctgacgatttttagt

SEQ ID NO: 5225 - RNA, 22 nt, synthetic construct
  source 1..22: mol_type = other RNA
ctcttaaggatttaataccaga

SEQ ID NO: 5226 - RNA, 22 nt, synthetic construct
  source 1..22: mol_type = other RNA
ctcttcccccaaaattggacaa

SEQ ID NO: 5227 - RNA, 22 nt, synthetic construct
  source 1..22: mol_type = other RNA
ctcttgttaaaactctaaactt

SEQ ID NO: 5228 - RNA, 22 nt, synthetic construct
  source 1..22: mol_type = other RNA
ctgaacgtttaaacagcctgac

SEQ ID NO: 5229 - RNA, 22 nt, synthetic construct
  source 1..22: mol_type = other RNA
ctgacaagattcctttacaatt

SEQ ID NO: 5230 - RNA, 22 nt, synthetic construct
  source 1..22: mol_type = other RNA
ctgacaagcatgtatatatgtt

SEQ ID NO: 5231 - RNA, 22 nt, synthetic construct
  source 1..22: mol_type = other RNA
ctgacaagtgatactgtggtaa

SEQ ID NO: 5232 - RNA, 22 nt, synthetic construct
  source 1..22: mol_type = other RNA
ctgacgatttttagttttgaaa

SEQ ID NO: 5233 - RNA, 22 nt, synthetic construct
  source 1..22: mol_type = other RNA
ctgaggcaaatttaaaaggcaa

SEQ ID NO: 5234 - RNA, 22 nt, synthetic construct
  source 1..22: mol_type = other RNA
ctgatgcttcattttgctacaa

SEQ ID NO: 5235 - RNA, 22 nt, synthetic construct
  source 1..22: mol_type = other RNA
ctgccagtaagaaattttaaat

SEQ ID NO: 5236 - RNA, 22 nt, synthetic construct
  source 1..22: mol_type = other RNA
ctgcttcattaggtttcataaa

SEQ ID NO: 5237 - RNA, 22 nt, synthetic construct
  source 1..22: mol_type = other RNA
ctggaacaaaatatttacttag

SEQ ID NO: 5238 - RNA, 22 nt, synthetic construct
  source 1..22: mol_type = other RNA
ctggcagttttaaaaaatcata

SEQ ID NO: 5239 - RNA, 22 nt, synthetic construct
  source 1..22: mol_type = other RNA
ctgggaaagttgtgatattagc

SEQ ID NO: 5240 - RNA, 22 nt, synthetic construct
  source 1..22: mol_type = other RNA
ctgggtctttgtttattgaatt

SEQ ID NO: 5241 - RNA, 22 nt, synthetic construct
  source 1..22: mol_type = other RNA
ctggtaattgtacagttcttaa

SEQ ID NO: 5242 - RNA, 22 nt, synthetic construct
  source 1..22: mol_type = other RNA
ctggtattaaatccttaagaga

SEQ ID NO: 5243 - RNA, 22 nt, synthetic construct
  source 1..22: mol_type = other RNA
ctgtaatctgacaagattcctt

SEQ ID NO: 5244 - RNA, 22 nt, synthetic construct
  source 1..22: mol_type = other RNA
ctgtacaattaccagtcctctg

SEQ ID NO: 5245 - RNA, 22 nt, synthetic construct
  source 1..22: mol_type = other RNA
ctgtattaaaataagttcgctg

SEQ ID NO: 5246 - RNA, 22 nt, synthetic construct
  source 1..22: mol_type = other RNA
ctgtatttagtcaagtttagag

SEQ ID NO: 5247 - RNA, 22 nt, synthetic construct
  source 1..22: mol_type = other RNA
ctgtcgaaattaacgctgattt

SEQ ID NO: 5248 - RNA, 22 nt, synthetic construct
  source 1..22: mol_type = other RNA
ctgtctatttaagattaaacat

SEQ ID NO: 5249 - RNA, 22 nt, synthetic construct
  source 1..22: mol_type = other RNA
ctgtctttaaacaaatggagat

SEQ ID NO: 5250 - RNA, 22 nt, synthetic construct
  source 1..22: mol_type = other RNA
ctgtgattctaatacattcgtg

SEQ ID NO: 5251 - RNA, 22 nt, synthetic construct
  source 1..22: mol_type = other RNA
ctgtgctgacgatttttagttt

SEQ ID NO: 5252 - RNA, 22 nt, synthetic construct
  source 1..22: mol_type = other RNA
ctgtggtaaaaaatttgtatct

SEQ ID NO: 5253 - RNA, 22 nt, synthetic construct
  source 1..22: mol_type = other RNA
ctgtggtcctgaaaattataga

SEQ ID NO: 5254 - RNA, 22 nt, synthetic construct
  source 1..22: mol_type = other RNA
ctgttgtgatgtcgataaacat

SEQ ID NO: 5255 - RNA, 22 nt, synthetic construct
  source 1..22: mol_type = other RNA
ctgtttaaacgttcagtaactt

SEQ ID NO: 5256 - RNA, 22 nt, synthetic construct
  source 1..22: mol_type = other RNA
cttaaagaataccgtttacatt

SEQ ID NO: 5257 - RNA, 22 nt, synthetic construct
  source 1..22: mol_type = other RNA
cttaaagtcactgtctatttaa

SEQ ID NO: 5258 - RNA, 22 nt, synthetic construct
  source 1..22: mol_type = other RNA
cttaaatagacagtgactttaa

SEQ ID NO: 5259 - RNA, 22 nt, synthetic construct
  source 1..22: mol_type = other RNA
cttaagagaaagcttgagaaat

SEQ ID NO: 5260 - RNA, 22 nt, synthetic construct
  source 1..22: mol_type = other RNA
cttaaggatttaataccagatt

SEQ ID NO: 5261 - RNA, 22 nt, synthetic construct
  source 1..22: mol_type = other RNA
cttactggcagttttaaaaaat

SEQ ID NO: 5262 - RNA, 22 nt, synthetic construct
  source 1..22: mol_type = other RNA
cttactgtaatctgacaagatt

SEQ ID NO: 5263 - RNA, 22 nt, synthetic construct
  source 1..22: mol_type = other RNA
cttagcattatgtatttcaaat

SEQ ID NO: 5264 - RNA, 22 nt, synthetic construct
  source 1..22: mol_type = other RNA
cttaggattcacatagatcata

SEQ ID NO: 5265 - RNA, 22 nt, synthetic construct
  source 1..22: mol_type = other RNA
cttagtagtcatctccatttgt

SEQ ID NO: 5266 - RNA, 22 nt, synthetic construct
  source 1..22: mol_type = other RNA
cttagtctgtggtcctgaaaat

SEQ ID NO: 5267 - RNA, 22 nt, synthetic construct
  source 1..22: mol_type = other RNA
cttcattaggtttcataaataa

SEQ ID NO: 5268 - RNA, 22 nt, synthetic construct
  source 1..22: mol_type = other RNA
cttcattttgctacaaaataat

SEQ ID NO: 5269 - RNA, 22 nt, synthetic construct
  source 1..22: mol_type = other RNA
cttcccccaaaattggacaatt

SEQ ID NO: 5270 - RNA, 22 nt, synthetic construct
  source 1..22: mol_type = other RNA
cttgaaaacctacacgaatgta

SEQ ID NO: 5271 - RNA, 22 nt, synthetic construct
  source 1..22: mol_type = other RNA
cttgactaaatacagaggactg

SEQ ID NO: 5272 - RNA, 22 nt, synthetic construct
  source 1..22: mol_type = other RNA
cttgcatgtttatcgacatcac

SEQ ID NO: 5273 - RNA, 22 nt, synthetic construct
  source 1..22: mol_type = other RNA
cttggaatgaggttaatgttta

SEQ ID NO: 5274 - RNA, 22 nt, synthetic construct
  source 1..22: mol_type = other RNA
cttgggcactatatcctttaac

SEQ ID NO: 5275 - RNA, 22 nt, synthetic construct
  source 1..22: mol_type = other RNA
cttgtcagattacagtaagaat

SEQ ID NO: 5276 - RNA, 22 nt, synthetic construct
  source 1..22: mol_type = other RNA
cttgtcaggctgtttaaacgtt

SEQ ID NO: 5277 - RNA, 22 nt, synthetic construct
  source 1..22: mol_type = other RNA
cttgttaaaactctaaacttga

SEQ ID NO: 5278 - RNA, 22 nt, synthetic construct
  source 1..22: mol_type = other RNA
cttgttacgaggtttatttcta

SEQ ID NO: 5279 - RNA, 22 nt, synthetic construct
  source 1..22: mol_type = other RNA
ctttaaacaaatggagatgact

SEQ ID NO: 5280 - RNA, 22 nt, synthetic construct
  source 1..22: mol_type = other RNA
ctttaacaaatgggtttaattt

SEQ ID NO: 5281 - RNA, 22 nt, synthetic construct
  source 1..22: mol_type = other RNA
ctttaacatgaggtatcactat

SEQ ID NO: 5282 - RNA, 22 nt, synthetic construct
  source 1..22: mol_type = other RNA
ctttaactcgatgccacaaata

SEQ ID NO: 5283 - RNA, 22 nt, synthetic construct
  source 1..22: mol_type = other RNA
ctttaaggttatgtgattgtat

SEQ ID NO: 5284 - RNA, 22 nt, synthetic construct
  source 1..22: mol_type = other RNA
ctttagggatttagggatttag

SEQ ID NO: 5285 - RNA, 22 nt, synthetic construct
  source 1..22: mol_type = other RNA
ctttcccagtttaaaaaactag

SEQ ID NO: 5286 - RNA, 22 nt, synthetic construct
  source 1..22: mol_type = other RNA
ctttctcttaaggatttaatac

SEQ ID NO: 5287 - RNA, 22 nt, synthetic construct
  source 1..22: mol_type = other RNA
ctttgtcaatacttagcattat

SEQ ID NO: 5288 - RNA, 22 nt, synthetic construct
  source 1..22: mol_type = other RNA
cttttattttaaaaggcatcat

SEQ ID NO: 5289 - RNA, 22 nt, synthetic construct
  source 1..22: mol_type = other RNA
cttttctggaacaaaatattta

SEQ ID NO: 5290 - RNA, 22 nt, synthetic construct
  source 1..22: mol_type = other RNA
gaaaacaaataattgtaaagga

SEQ ID NO: 5291 - RNA, 22 nt, synthetic construct
  source 1..22: mol_type = other RNA
gaaaacctacacgaatgtatta

SEQ ID NO: 5292 - RNA, 22 nt, synthetic construct
  source 1..22: mol_type = other RNA
gaaaagtacaaaataataaagg

SEQ ID NO: 5293 - RNA, 22 nt, synthetic construct
  source 1..22: mol_type = other RNA
gaaaccaaatagaggaagcaac

SEQ ID NO: 5294 - RNA, 22 nt, synthetic construct
  source 1..22: mol_type = other RNA
gaaacctaatgaagcagaatta

SEQ ID NO: 5295 - RNA, 22 nt, synthetic construct
  source 1..22: mol_type = other RNA
gaaagcttgagaaatagatttt

SEQ ID NO: 5296 - RNA, 22 nt, synthetic construct
  source 1..22: mol_type = other RNA
gaaagttgtgatattagctcat

SEQ ID NO: 5297 - RNA, 22 nt, synthetic construct
  source 1..22: mol_type = other RNA
gaaataaacctcgtaacaagtt

SEQ ID NO: 5298 - RNA, 22 nt, synthetic construct
  source 1..22: mol_type = other RNA
gaaatacataatgctaagtatt

SEQ ID NO: 5299 - RNA, 22 nt, synthetic construct
  source 1..22: mol_type = other RNA
gaaatataaactttaactcgat

SEQ ID NO: 5300 - RNA, 22 nt, synthetic construct
  source 1..22: mol_type = other RNA
gaaatgtaaacggtattcttta

SEQ ID NO: 5301 - RNA, 22 nt, synthetic construct
  source 1..22: mol_type = other RNA
gaaattgtccaattttggggga

SEQ ID NO: 5302 - RNA, 22 nt, synthetic construct
  source 1..22: mol_type = other RNA
gaacaaaatatttacttaggat

SEQ ID NO: 5303 - RNA, 22 nt, synthetic construct
  source 1..22: mol_type = other RNA
gaacatatttgtggcatcgagt

SEQ ID NO: 5304 - RNA, 22 nt, synthetic construct
  source 1..22: mol_type = other RNA
gaacgtttaaacagcctgacaa

SEQ ID NO: 5305 - RNA, 22 nt, synthetic construct
  source 1..22: mol_type = other RNA
gaactgtacaattaccagtcct

SEQ ID NO: 5306 - RNA, 22 nt, synthetic construct
  source 1..22: mol_type = other RNA
gaagagaggagccattttggta

SEQ ID NO: 5307 - RNA, 22 nt, synthetic construct
  source 1..22: mol_type = other RNA
gaagcaactcatatattaaata

SEQ ID NO: 5308 - RNA, 22 nt, synthetic construct
  source 1..22: mol_type = other RNA
gaagcagaattaaatactgtat

SEQ ID NO: 5309 - RNA, 22 nt, synthetic construct
  source 1..22: mol_type = other RNA
gaagcatcagtttaaaaatttg

SEQ ID NO: 5310 - RNA, 22 nt, synthetic construct
  source 1..22: mol_type = other RNA
gaataccaaaatggctcctctc

SEQ ID NO: 5311 - RNA, 22 nt, synthetic construct
  source 1..22: mol_type = other RNA
gaataccgtttacatttctcaa

SEQ ID NO: 5312 - RNA, 22 nt, synthetic construct
  source 1..22: mol_type = other RNA
gaatcaattttagatggtcaca

SEQ ID NO: 5313 - RNA, 22 nt, synthetic construct
  source 1..22: mol_type = other RNA
gaatcacagcatatttagggga

SEQ ID NO: 5314 - RNA, 22 nt, synthetic construct
  source 1..22: mol_type = other RNA
gaatcctaagtaaatattttgt

SEQ ID NO: 5315 - RNA, 22 nt, synthetic construct
  source 1..22: mol_type = other RNA
gaatcttgtcagattacagtaa

SEQ ID NO: 5316 - RNA, 22 nt, synthetic construct
  source 1..22: mol_type = other RNA
gaatgaacatatttgtggcatc

SEQ ID NO: 5317 - RNA, 22 nt, synthetic construct
  source 1..22: mol_type = other RNA
gaatgaggttaatgtttaaatt

SEQ ID NO: 5318 - RNA, 22 nt, synthetic construct
  source 1..22: mol_type = other RNA
gaatgtattagaatcacagcat

SEQ ID NO: 5319 - RNA, 22 nt, synthetic construct
  source 1..22: mol_type = other RNA
gaattttgattgagaaatgtaa

SEQ ID NO: 5320 - RNA, 22 nt, synthetic construct
  source 1..22: mol_type = other RNA
gacaaaggtaggtcaccatata

SEQ ID NO: 5321 - RNA, 22 nt, synthetic construct
  source 1..22: mol_type = other RNA
gacaagattcctttacaattat

SEQ ID NO: 5322 - RNA, 22 nt, synthetic construct
  source 1..22: mol_type = other RNA
gacaagcatgtatatatgttta

SEQ ID NO: 5323 - RNA, 22 nt, synthetic construct
  source 1..22: mol_type = other RNA
gacaagtgatactgtggtaaaa

SEQ ID NO: 5324 - RNA, 22 nt, synthetic construct
  source 1..22: mol_type = other RNA
gacaatttcaaatgcaaaataa

SEQ ID NO: 5325 - RNA, 22 nt, synthetic construct
  source 1..22: mol_type = other RNA
gacagcgaacttattttaatac

SEQ ID NO: 5326 - RNA, 22 nt, synthetic construct
  source 1..22: mol_type = other RNA
gacagcttagtctgtggtcctg

SEQ ID NO: 5327 - RNA, 22 nt, synthetic construct
  source 1..22: mol_type = other RNA
gacagtgactttaagataaaaa

SEQ ID NO: 5328 - RNA, 22 nt, synthetic construct
  source 1..22: mol_type = other RNA
gacatcacaacagatccctaaa

SEQ ID NO: 5329 - RNA, 22 nt, synthetic construct
  source 1..22: mol_type = other RNA
gacatgtatattggataatttg

SEQ ID NO: 5330 - RNA, 22 nt, synthetic construct
  source 1..22: mol_type = other RNA
gaccacagactaagctgtcgaa

SEQ ID NO: 5331 - RNA, 22 nt, synthetic construct
  source 1..22: mol_type = other RNA
gaccacattaacttggaatgag

SEQ ID NO: 5332 - RNA, 22 nt, synthetic construct
  source 1..22: mol_type = other RNA
gaccatctaaaattgattccca

SEQ ID NO: 5333 - RNA, 22 nt, synthetic construct
  source 1..22: mol_type = other RNA
gacccagtccctaaattataga

SEQ ID NO: 5334 - RNA, 22 nt, synthetic construct
  source 1..22: mol_type = other RNA
gacctacctttgtcaatactta

SEQ ID NO: 5335 - RNA, 22 nt, synthetic construct
  source 1..22: mol_type = other RNA
gacgatttttagttttgaaatt

SEQ ID NO: 5336 - RNA, 22 nt, synthetic construct
  source 1..22: mol_type = other RNA
gactaaatacagaggactggta

SEQ ID NO: 5337 - RNA, 22 nt, synthetic construct
  source 1..22: mol_type = other RNA
gactaagctgtcgaaattaacg

SEQ ID NO: 5338 - RNA, 22 nt, synthetic construct
  source 1..22: mol_type = other RNA
gactactaagtcacattgactt

SEQ ID NO: 5339 - RNA, 22 nt, synthetic construct
  source 1..22: mol_type = other RNA
gactgggtctttgtttattgaa

SEQ ID NO: 5340 - RNA, 22 nt, synthetic construct
  source 1..22: mol_type = other RNA
gactggtaattgtacagttctt

SEQ ID NO: 5341 - RNA, 22 nt, synthetic construct
  source 1..22: mol_type = other RNA
gacttagtagtcatctccattt

SEQ ID NO: 5342 - RNA, 22 nt, synthetic construct
  source 1..22: mol_type = other RNA
gactttaacatgaggtatcact

SEQ ID NO: 5343 - RNA, 22 nt, synthetic construct
  source 1..22: mol_type = other RNA
gacttttattttaaaaggcatc

SEQ ID NO: 5344 - RNA, 22 nt, synthetic construct
  source 1..22: mol_type = other RNA
gagaaagcttgagaaatagatt

SEQ ID NO: 5345 - RNA, 22 nt, synthetic construct
  source 1..22: mol_type = other RNA
gagaaatgtaaacggtattctt

SEQ ID NO: 5346 - RNA, 22 nt, synthetic construct
  source 1..22: mol_type = other RNA
gagacttttattttaaaaggca

SEQ ID NO: 5347 - RNA, 22 nt, synthetic construct
  source 1..22: mol_type = other RNA
gagaggagccattttggtattc

SEQ ID NO: 5348 - RNA, 22 nt, synthetic construct
  source 1..22: mol_type = other RNA
gagatgactactaagtcacatt

SEQ ID NO: 5349 - RNA, 22 nt, synthetic construct
  source 1..22: mol_type = other RNA
gagccattttggtattctggcc

SEQ ID NO: 5350 - RNA, 22 nt, synthetic construct
  source 1..22: mol_type = other RNA
gagctaatatcacaactttccc

SEQ ID NO: 5351 - RNA, 22 nt, synthetic construct
  source 1..22: mol_type = other RNA
gaggaagcaactcatatattaa

SEQ ID NO: 5352 - RNA, 22 nt, synthetic construct
  source 1..22: mol_type = other RNA
gaggactggtaattgtacagtt

SEQ ID NO: 5353 - RNA, 22 nt, synthetic construct
  source 1..22: mol_type = other RNA
gaggagccattttggtattctg

SEQ ID NO: 5354 - RNA, 22 nt, synthetic construct
  source 1..22: mol_type = other RNA
gaggcaaatttaaaaggcaata

SEQ ID NO: 5355 - RNA, 22 nt, synthetic construct
  source 1..22: mol_type = other RNA
gaggtatcactataccttattt

SEQ ID NO: 5356 - RNA, 22 nt, synthetic construct
  source 1..22: mol_type = other RNA
gaggttaatgtttaaattattg

SEQ ID NO: 5357 - RNA, 22 nt, synthetic construct
  source 1..22: mol_type = other RNA
gaggtttatttctacttgaaaa

SEQ ID NO: 5358 - RNA, 22 nt, synthetic construct
  source 1..22: mol_type = other RNA
gagtaaatgtttgatatgattt

SEQ ID NO: 5359 - RNA, 22 nt, synthetic construct
  source 1..22: mol_type = other RNA
gagtactagttttttaaactgg

SEQ ID NO: 5360 - RNA, 22 nt, synthetic construct
  source 1..22: mol_type = other RNA
gagtatgtgtaaaaatctgtaa

SEQ ID NO: 5361 - RNA, 22 nt, synthetic construct
  source 1..22: mol_type = other RNA
gagttaaagtttatatttcccc

SEQ ID NO: 5362 - RNA, 22 nt, synthetic construct
  source 1..22: mol_type = other RNA
gagttttaacaagagtactagt

SEQ ID NO: 5363 - RNA, 22 nt, synthetic construct
  source 1..22: mol_type = other RNA
gataaacatgcaagaataattt

SEQ ID NO: 5364 - RNA, 22 nt, synthetic construct
  source 1..22: mol_type = other RNA
gataatttgaaatacataatgc

SEQ ID NO: 5365 - RNA, 22 nt, synthetic construct
  source 1..22: mol_type = other RNA
gatacaaattttttaccacagt

SEQ ID NO: 5366 - RNA, 22 nt, synthetic construct
  source 1..22: mol_type = other RNA
gatacctcatgttaaagtcaat

SEQ ID NO: 5367 - RNA, 22 nt, synthetic construct
  source 1..22: mol_type = other RNA
gatactgtggtaaaaaatttgt

SEQ ID NO: 5368 - RNA, 22 nt, synthetic construct
  source 1..22: mol_type = other RNA
gatatagtgcccaagttatatg

SEQ ID NO: 5369 - RNA, 22 nt, synthetic construct
  source 1..22: mol_type = other RNA
gatatgatttatttatgaaacc

SEQ ID NO: 5370 - RNA, 22 nt, synthetic construct
  source 1..22: mol_type = other RNA
gatatgtatgatctatgtgaat

SEQ ID NO: 5371 - RNA, 22 nt, synthetic construct
  source 1..22: mol_type = other RNA
gatattagctcatatgatgcct

SEQ ID NO: 5372 - RNA, 22 nt, synthetic construct
  source 1..22: mol_type = other RNA
gatccctaaatccctaaatccc

SEQ ID NO: 5373 - RNA, 22 nt, synthetic construct
  source 1..22: mol_type = other RNA
gatctatgtgaatcctaagtaa

SEQ ID NO: 5374 - RNA, 22 nt, synthetic construct
  source 1..22: mol_type = other RNA
gatctgttgtgatgtcgataaa

SEQ ID NO: 5375 - RNA, 22 nt, synthetic construct
  source 1..22: mol_type = other RNA
gatgactactaagtcacattga

SEQ ID NO: 5376 - RNA, 22 nt, synthetic construct
  source 1..22: mol_type = other RNA
gatgccacaaatatgttcattc

SEQ ID NO: 5377 - RNA, 22 nt, synthetic construct
  source 1..22: mol_type = other RNA
gatgccttttaaaataaaagtc

SEQ ID NO: 5378 - RNA, 22 nt, synthetic construct
  source 1..22: mol_type = other RNA
gatgcttcattttgctacaaaa

SEQ ID NO: 5379 - RNA, 22 nt, synthetic construct
  source 1..22: mol_type = other RNA
gatggtcacaatctagattata

SEQ ID NO: 5380 - RNA, 22 nt, synthetic construct
  source 1..22: mol_type = other RNA
gatgtcgataaacatgcaagaa

SEQ ID NO: 5381 - RNA, 22 nt, synthetic construct
  source 1..22: mol_type = other RNA
gatgtgggaatcaattttagat

SEQ ID NO: 5382 - RNA, 22 nt, synthetic construct
  source 1..22: mol_type = other RNA
gattaaacatacaatcacataa

SEQ ID NO: 5383 - RNA, 22 nt, synthetic construct
  source 1..22: mol_type = other RNA
gattacagtaagaatgaacata

SEQ ID NO: 5384 - RNA, 22 nt, synthetic construct
  source 1..22: mol_type = other RNA
gattagatacaaattttttacc

SEQ ID NO: 5385 - RNA, 22 nt, synthetic construct
  source 1..22: mol_type = other RNA
gattataatcaataggtgaact

SEQ ID NO: 5386 - RNA, 22 nt, synthetic construct
  source 1..22: mol_type = other RNA
gattataatctagattgtgacc

SEQ ID NO: 5387 - RNA, 22 nt, synthetic construct
  source 1..22: mol_type = other RNA
gattattagaccacattaactt

SEQ ID NO: 5388 - RNA, 22 nt, synthetic construct
  source 1..22: mol_type = other RNA
gattcacatagatcatacatat

SEQ ID NO: 5389 - RNA, 22 nt, synthetic construct
  source 1..22: mol_type = other RNA
gattcccacatcacaaaattta

SEQ ID NO: 5390 - RNA, 22 nt, synthetic construct
  source 1..22: mol_type = other RNA
gattcctttacaattatttgtt

SEQ ID NO: 5391 - RNA, 22 nt, synthetic construct
  source 1..22: mol_type = other RNA
gattctaatacattcgtgtagg

SEQ ID NO: 5392 - RNA, 22 nt, synthetic construct
  source 1..22: mol_type = other RNA
gattgagaaatgtaaacggtat

SEQ ID NO: 5393 - RNA, 22 nt, synthetic construct
  source 1..22: mol_type = other RNA
gattgtgaccatctaaaattga

SEQ ID NO: 5394 - RNA, 22 nt, synthetic construct
  source 1..22: mol_type = other RNA
gatttaataccagattattaga

SEQ ID NO: 5395 - RNA, 22 nt, synthetic construct
  source 1..22: mol_type = other RNA
gatttagggatctgttgtgatg

SEQ ID NO: 5396 - RNA, 22 nt, synthetic construct
  source 1..22: mol_type = other RNA
gatttagggatttagggatctg

SEQ ID NO: 5397 - RNA, 22 nt, synthetic construct
  source 1..22: mol_type = other RNA
gatttatttatgaaacctaatg

SEQ ID NO: 5398 - RNA, 22 nt, synthetic construct
  source 1..22: mol_type = other RNA
gatttttacacatactctgtgc

SEQ ID NO: 5399 - RNA, 22 nt, synthetic construct
  source 1..22: mol_type = other RNA
gattttttaaaactgccagtaa

SEQ ID NO: 5400 - RNA, 22 nt, synthetic construct
  source 1..22: mol_type = other RNA
gcaaaatgaagcatcagtttaa

SEQ ID NO: 5401 - RNA, 22 nt, synthetic construct
  source 1..22: mol_type = other RNA
gcaaatttaaaaggcaataatt

SEQ ID NO: 5402 - RNA, 22 nt, synthetic construct
  source 1..22: mol_type = other RNA
gcaactcatatattaaataatg

SEQ ID NO: 5403 - RNA, 22 nt, synthetic construct
  source 1..22: mol_type = other RNA
gcaataatttaaacattaacct

SEQ ID NO: 5404 - RNA, 22 nt, synthetic construct
  source 1..22: mol_type = other RNA
gcacagagtatgtgtaaaaatc

SEQ ID NO: 5405 - RNA, 22 nt, synthetic construct
  source 1..22: mol_type = other RNA
gcactatatcctttaacaaatg

SEQ ID NO: 5406 - RNA, 22 nt, synthetic construct
  source 1..22: mol_type = other RNA
gcagaattaaatactgtattaa

SEQ ID NO: 5407 - RNA, 22 nt, synthetic construct
  source 1..22: mol_type = other RNA
gcatatttaggggaaatataaa

SEQ ID NO: 5408 - RNA, 22 nt, synthetic construct
  source 1..22: mol_type = other RNA
gcatcagtttaaaaatttgtat

SEQ ID NO: 5409 - RNA, 22 nt, synthetic construct
  source 1..22: mol_type = other RNA
gcatcatatgagctaatatcac

SEQ ID NO: 5410 - RNA, 22 nt, synthetic construct
  source 1..22: mol_type = other RNA
gcatcgagttaaagtttatatt

SEQ ID NO: 5411 - RNA, 22 nt, synthetic construct
  source 1..22: mol_type = other RNA
gcatgtttatcgacatcacaac

SEQ ID NO: 5412 - RNA, 22 nt, synthetic construct
  source 1..22: mol_type = other RNA
gcattatgtatttcaaattatc

SEQ ID NO: 5413 - RNA, 22 nt, synthetic construct
  source 1..22: mol_type = other RNA
gcatttgaaattgtccaatttt

SEQ ID NO: 5414 - RNA, 22 nt, synthetic construct
  source 1..22: mol_type = other RNA
gccacaaatatgttcattctta

SEQ ID NO: 5415 - RNA, 22 nt, synthetic construct
  source 1..22: mol_type = other RNA
gccagaataccaaaatggctcc

SEQ ID NO: 5416 - RNA, 22 nt, synthetic construct
  source 1..22: mol_type = other RNA
gccagtaagaaattttaaatta

SEQ ID NO: 5417 - RNA, 22 nt, synthetic construct
  source 1..22: mol_type = other RNA
gccattttggtattctggccct

SEQ ID NO: 5418 - RNA, 22 nt, synthetic construct
  source 1..22: mol_type = other RNA
gcccaagttatatggtgaccta

SEQ ID NO: 5419 - RNA, 22 nt, synthetic construct
  source 1..22: mol_type = other RNA
gcctgacaagcatgtatatatg

SEQ ID NO: 5420 - RNA, 22 nt, synthetic construct
  source 1..22: mol_type = other RNA
gccttttaaaataaaagtctct

SEQ ID NO: 5421 - RNA, 22 nt, synthetic construct
  source 1..22: mol_type = other RNA
gcgaacttattttaatacagta

SEQ ID NO: 5422 - RNA, 22 nt, synthetic construct
  source 1..22: mol_type = other RNA
gcgttaatttcgacagcttagt

SEQ ID NO: 5423 - RNA, 22 nt, synthetic construct
  source 1..22: mol_type = other RNA
gctaagtattgacaaaggtagg

SEQ ID NO: 5424 - RNA, 22 nt, synthetic construct
  source 1..22: mol_type = other RNA
gctaatatcacaactttcccag

SEQ ID NO: 5425 - RNA, 22 nt, synthetic construct
  source 1..22: mol_type = other RNA
gctacaaaataatttggagtaa

SEQ ID NO: 5426 - RNA, 22 nt, synthetic construct
  source 1..22: mol_type = other RNA
gctcatatgatgccttttaaaa

SEQ ID NO: 5427 - RNA, 22 nt, synthetic construct
  source 1..22: mol_type = other RNA
gctcctctcttcccccaaaatt

SEQ ID NO: 5428 - RNA, 22 nt, synthetic construct
  source 1..22: mol_type = other RNA
gctgacgatttttagttttgaa

SEQ ID NO: 5429 - RNA, 22 nt, synthetic construct
  source 1..22: mol_type = other RNA
gctgtcgaaattaacgctgatt

SEQ ID NO: 5430 - RNA, 22 nt, synthetic construct
  source 1..22: mol_type = other RNA
gctgtctttaaacaaatggaga

SEQ ID NO: 5431 - RNA, 22 nt, synthetic construct
  source 1..22: mol_type = other RNA
gctgtgattctaatacattcgt

SEQ ID NO: 5432 - RNA, 22 nt, synthetic construct
  source 1..22: mol_type = other RNA
gctgtttaaacgttcagtaact

SEQ ID NO: 5433 - RNA, 22 nt, synthetic construct
  source 1..22: mol_type = other RNA
gcttagtctgtggtcctgaaaa

SEQ ID NO: 5434 - RNA, 22 nt, synthetic construct
  source 1..22: mol_type = other RNA
gcttcattaggtttcataaata

SEQ ID NO: 5435 - RNA, 22 nt, synthetic construct
  source 1..22: mol_type = other RNA
gcttcattttgctacaaaataa

SEQ ID NO: 5436 - RNA, 22 nt, synthetic construct
  source 1..22: mol_type = other RNA
gcttgtcaggctgtttaaacgt

SEQ ID NO: 5437 - RNA, 22 nt, synthetic construct
  source 1..22: mol_type = other RNA
gctttctcttaaggatttaata

SEQ ID NO: 5438 - RNA, 22 nt, synthetic construct
  source 1..22: mol_type = other RNA
ggaaaccaaatagaggaagcaa

SEQ ID NO: 5439 - RNA, 22 nt, synthetic construct
  source 1..22: mol_type = other RNA
ggaaagttgtgatattagctca

SEQ ID NO: 5440 - RNA, 22 nt, synthetic construct
  source 1..22: mol_type = other RNA
ggaaatataaactttaactcga

SEQ ID NO: 5441 - RNA, 22 nt, synthetic construct
  source 1..22: mol_type = other RNA
ggaacaaaatatttacttagga

SEQ ID NO: 5442 - RNA, 22 nt, synthetic construct
  source 1..22: mol_type = other RNA
ggaagagaggagccattttggt

SEQ ID NO: 5443 - RNA, 22 nt, synthetic construct
  source 1..22: mol_type = other RNA
ggaagcaactcatatattaaat

SEQ ID NO: 5444 - RNA, 22 nt, synthetic construct
  source 1..22: mol_type = other RNA
ggaatcaattttagatggtcac

SEQ ID NO: 5445 - RNA, 22 nt, synthetic construct
  source 1..22: mol_type = other RNA
ggaatcttgtcagattacagta

SEQ ID NO: 5446 - RNA, 22 nt, synthetic construct
  source 1..22: mol_type = other RNA
ggaatgaggttaatgtttaaat

SEQ ID NO: 5447 - RNA, 22 nt, synthetic construct
  source 1..22: mol_type = other RNA
ggacaatttcaaatgcaaaata

SEQ ID NO: 5448 - RNA, 22 nt, synthetic construct
  source 1..22: mol_type = other RNA
ggaccacagactaagctgtcga

SEQ ID NO: 5449 - RNA, 22 nt, synthetic construct
  source 1..22: mol_type = other RNA
ggactgggtctttgtttattga

SEQ ID NO: 5450 - RNA, 22 nt, synthetic construct
  source 1..22: mol_type = other RNA
ggactggtaattgtacagttct

SEQ ID NO: 5451 - RNA, 22 nt, synthetic construct
  source 1..22: mol_type = other RNA
ggagatgactactaagtcacat

SEQ ID NO: 5452 - RNA, 22 nt, synthetic construct
  source 1..22: mol_type = other RNA
ggagccattttggtattctggc

SEQ ID NO: 5453 - RNA, 22 nt, synthetic construct
  source 1..22: mol_type = other RNA
ggagtaaatgtttgatatgatt

SEQ ID NO: 5454 - RNA, 22 nt, synthetic construct
  source 1..22: mol_type = other RNA
ggataatttgaaatacataatg

SEQ ID NO: 5455 - RNA, 22 nt, synthetic construct
  source 1..22: mol_type = other RNA
ggatatagtgcccaagttatat

SEQ ID NO: 5456 - RNA, 22 nt, synthetic construct
  source 1..22: mol_type = other RNA
ggatctgttgtgatgtcgataa

SEQ ID NO: 5457 - RNA, 22 nt, synthetic construct
  source 1..22: mol_type = other RNA
ggattcacatagatcatacata

SEQ ID NO: 5458 - RNA, 22 nt, synthetic construct
  source 1..22: mol_type = other RNA
ggatttaataccagattattag

SEQ ID NO: 5459 - RNA, 22 nt, synthetic construct
  source 1..22: mol_type = other RNA
ggatttagggatctgttgtgat

SEQ ID NO: 5460 - RNA, 22 nt, synthetic construct
  source 1..22: mol_type = other RNA
ggatttagggatttagggatct

SEQ ID NO: 5461 - RNA, 22 nt, synthetic construct
  source 1..22: mol_type = other RNA
ggcaaatttaaaaggcaataat

SEQ ID NO: 5462 - RNA, 22 nt, synthetic construct
  source 1..22: mol_type = other RNA
ggcaataatttaaacattaacc

SEQ ID NO: 5463 - RNA, 22 nt, synthetic construct
  source 1..22: mol_type = other RNA
ggcactatatcctttaacaaat

SEQ ID NO: 5464 - RNA, 22 nt, synthetic construct
  source 1..22: mol_type = other RNA
ggcagttttaaaaaatcatatt

SEQ ID NO: 5465 - RNA, 22 nt, synthetic construct
  source 1..22: mol_type = other RNA
ggcatcatatgagctaatatca

SEQ ID NO: 5466 - RNA, 22 nt, synthetic construct
  source 1..22: mol_type = other RNA
ggcatcgagttaaagtttatat

SEQ ID NO: 5467 - RNA, 22 nt, synthetic construct
  source 1..22: mol_type = other RNA
ggccagaataccaaaatggctc

SEQ ID NO: 5468 - RNA, 22 nt, synthetic construct
  source 1..22: mol_type = other RNA
ggctcctctcttcccccaaaat

SEQ ID NO: 5469 - RNA, 22 nt, synthetic construct
  source 1..22: mol_type = other RNA
ggctgtttaaacgttcagtaac

SEQ ID NO: 5470 - RNA, 22 nt, synthetic construct
  source 1..22: mol_type = other RNA
gggaaagttgtgatattagctc

SEQ ID NO: 5471 - RNA, 22 nt, synthetic construct
  source 1..22: mol_type = other RNA
gggaaatataaactttaactcg

SEQ ID NO: 5472 - RNA, 22 nt, synthetic construct
  source 1..22: mol_type = other RNA
gggaagagaggagccattttgg

SEQ ID NO: 5473 - RNA, 22 nt, synthetic construct
  source 1..22: mol_type = other RNA
gggaatcaattttagatggtca

SEQ ID NO: 5474 - RNA, 22 nt, synthetic construct
  source 1..22: mol_type = other RNA
gggactgggtctttgtttattg

SEQ ID NO: 5475 - RNA, 22 nt, synthetic construct
  source 1..22: mol_type = other RNA
gggatctgttgtgatgtcgata

SEQ ID NO: 5476 - RNA, 22 nt, synthetic construct
  source 1..22: mol_type = other RNA
gggatttagggatctgttgtga

SEQ ID NO: 5477 - RNA, 22 nt, synthetic construct
  source 1..22: mol_type = other RNA
gggatttagggatttagggatc

SEQ ID NO: 5478 - RNA, 22 nt, synthetic construct
  source 1..22: mol_type = other RNA
gggcactatatcctttaacaaa

SEQ ID NO: 5479 - RNA, 22 nt, synthetic construct
  source 1..22: mol_type = other RNA
gggccagaataccaaaatggct

SEQ ID NO: 5480 - RNA, 22 nt, synthetic construct
  source 1..22: mol_type = other RNA
ggggaaatataaactttaactc

SEQ ID NO: 5481 - RNA, 22 nt, synthetic construct
  source 1..22: mol_type = other RNA
ggggaagagaggagccattttg

SEQ ID NO: 5482 - RNA, 22 nt, synthetic construct
  source 1..22: mol_type = other RNA
gggggaagagaggagccatttt

SEQ ID NO: 5483 - RNA, 22 nt, synthetic construct
  source 1..22: mol_type = other RNA
gggtctttgtttattgaatttt

SEQ ID NO: 5484 - RNA, 22 nt, synthetic construct
  source 1..22: mol_type = other RNA
ggtaaaaaatttgtatctaatc

SEQ ID NO: 5485 - RNA, 22 nt, synthetic construct
  source 1..22: mol_type = other RNA
ggtaattgtacagttcttaaat

SEQ ID NO: 5486 - RNA, 22 nt, synthetic construct
  source 1..22: mol_type = other RNA
ggtaggtcaccatataacttgg

SEQ ID NO: 5487 - RNA, 22 nt, synthetic construct
  source 1..22: mol_type = other RNA
ggtatagtgatacctcatgtta

SEQ ID NO: 5488 - RNA, 22 nt, synthetic construct
  source 1..22: mol_type = other RNA
ggtatcactataccttatttgt

SEQ ID NO: 5489 - RNA, 22 nt, synthetic construct
  source 1..22: mol_type = other RNA
ggtattaaatccttaagagaaa

SEQ ID NO: 5490 - RNA, 22 nt, synthetic construct
  source 1..22: mol_type = other RNA
ggtattctttaaggttatgtga

SEQ ID NO: 5491 - RNA, 22 nt, synthetic construct
  source 1..22: mol_type = other RNA
ggtcacaatctagattataatc

SEQ ID NO: 5492 - RNA, 22 nt, synthetic construct
  source 1..22: mol_type = other RNA
ggtcaccatataacttgggcac

SEQ ID NO: 5493 - RNA, 22 nt, synthetic construct
  source 1..22: mol_type = other RNA
ggtcctgaaaattatagattat

SEQ ID NO: 5494 - RNA, 22 nt, synthetic construct
  source 1..22: mol_type = other RNA
ggtctaataatctggtattaaa

SEQ ID NO: 5495 - RNA, 22 nt, synthetic construct
  source 1..22: mol_type = other RNA
ggtctttgtttattgaatttta

SEQ ID NO: 5496 - RNA, 22 nt, synthetic construct
  source 1..22: mol_type = other RNA
ggtgaacttattaaataacttt

SEQ ID NO: 5497 - RNA, 22 nt, synthetic construct
  source 1..22: mol_type = other RNA
ggtgacctacctttgtcaatac

SEQ ID NO: 5498 - RNA, 22 nt, synthetic construct
  source 1..22: mol_type = other RNA
ggttaatgtttaaattattgcc

SEQ ID NO: 5499 - RNA, 22 nt, synthetic construct
  source 1..22: mol_type = other RNA
ggttatgtgattgtatgtttaa

SEQ ID NO: 5500 - RNA, 22 nt, synthetic construct
  source 1..22: mol_type = other RNA
ggtttatttctacttgaaaacc

SEQ ID NO: 5501 - RNA, 22 nt, synthetic construct
  source 1..22: mol_type = other RNA
ggtttcataaataaatcatatc

SEQ ID NO: 5502 - RNA, 22 nt, synthetic construct
  source 1..22: mol_type = other RNA
ggttttcaagtagaaataaacc

SEQ ID NO: 5503 - RNA, 22 nt, synthetic construct
  source 1..22: mol_type = other RNA
gtaaacggtattctttaaggtt

SEQ ID NO: 5504 - RNA, 22 nt, synthetic construct
  source 1..22: mol_type = other RNA
gtaaaggaatcttgtcagatta

SEQ ID NO: 5505 - RNA, 22 nt, synthetic construct
  source 1..22: mol_type = other RNA
gtaaatattttgttccagaaaa

SEQ ID NO: 5506 - RNA, 22 nt, synthetic construct
  source 1..22: mol_type = other RNA
gtaacaagttactgaacgttta

SEQ ID NO: 5507 - RNA, 22 nt, synthetic construct
  source 1..22: mol_type = other RNA
gtaacttgttacgaggtttatt

SEQ ID NO: 5508 - RNA, 22 nt, synthetic construct
  source 1..22: mol_type = other RNA
gtaagaatgaacatatttgtgg

SEQ ID NO: 5509 - RNA, 22 nt, synthetic construct
  source 1..22: mol_type = other RNA
gtaatctgacaagattccttta

SEQ ID NO: 5510 - RNA, 22 nt, synthetic construct
  source 1..22: mol_type = other RNA
gtaattgtacagttcttaaatg

SEQ ID NO: 5511 - RNA, 22 nt, synthetic construct
  source 1..22: mol_type = other RNA
gtacaattaccagtcctctgta

SEQ ID NO: 5512 - RNA, 22 nt, synthetic construct
  source 1..22: mol_type = other RNA
gtacagttcttaaatgttgtag

SEQ ID NO: 5513 - RNA, 22 nt, synthetic construct
  source 1..22: mol_type = other RNA
gtactagttttttaaactggga

SEQ ID NO: 5514 - RNA, 22 nt, synthetic construct
  source 1..22: mol_type = other RNA
gtactcttgttaaaactctaaa

SEQ ID NO: 5515 - RNA, 22 nt, synthetic construct
  source 1..22: mol_type = other RNA
gtacttttctggaacaaaatat

SEQ ID NO: 5516 - RNA, 22 nt, synthetic construct
  source 1..22: mol_type = other RNA
gtagaaataaacctcgtaacaa

SEQ ID NO: 5517 - RNA, 22 nt, synthetic construct
  source 1..22: mol_type = other RNA
gtagcaaaatgaagcatcagtt

SEQ ID NO: 5518 - RNA, 22 nt, synthetic construct
  source 1..22: mol_type = other RNA
gtaggtcaccatataacttggg

SEQ ID NO: 5519 - RNA, 22 nt, synthetic construct
  source 1..22: mol_type = other RNA
gtaggttttcaagtagaaataa

SEQ ID NO: 5520 - RNA, 22 nt, synthetic construct
  source 1..22: mol_type = other RNA
gtagtcatctccatttgtttaa

SEQ ID NO: 5521 - RNA, 22 nt, synthetic construct
  source 1..22: mol_type = other RNA
gtatagtgatacctcatgttaa

SEQ ID NO: 5522 - RNA, 22 nt, synthetic construct
  source 1..22: mol_type = other RNA
gtatcactataccttatttgtt

SEQ ID NO: 5523 - RNA, 22 nt, synthetic construct
  source 1..22: mol_type = other RNA
gtatcacttgtcagaatttatt

SEQ ID NO: 5524 - RNA, 22 nt, synthetic construct
  source 1..22: mol_type = other RNA
gtatctaatctttagggattta

SEQ ID NO: 5525 - RNA, 22 nt, synthetic construct
  source 1..22: mol_type = other RNA
gtatgatctatgtgaatcctaa

SEQ ID NO: 5526 - RNA, 22 nt, synthetic construct
  source 1..22: mol_type = other RNA
gtatgtgtaaaaatctgtaata

SEQ ID NO: 5527 - RNA, 22 nt, synthetic construct
  source 1..22: mol_type = other RNA
gtatgtttaatcttaaatagac

SEQ ID NO: 5528 - RNA, 22 nt, synthetic construct
  source 1..22: mol_type = other RNA
gtattaaaataagttcgctgtc

SEQ ID NO: 5529 - RNA, 22 nt, synthetic construct
  source 1..22: mol_type = other RNA
gtattaaatccttaagagaaag

SEQ ID NO: 5530 - RNA, 22 nt, synthetic construct
  source 1..22: mol_type = other RNA
gtattacagatttttacacata

SEQ ID NO: 5531 - RNA, 22 nt, synthetic construct
  source 1..22: mol_type = other RNA
gtattagaatcacagcatattt

SEQ ID NO: 5532 - RNA, 22 nt, synthetic construct
  source 1..22: mol_type = other RNA
gtattctttaaggttatgtgat

SEQ ID NO: 5533 - RNA, 22 nt, synthetic construct
  source 1..22: mol_type = other RNA
gtattgacaaaggtaggtcacc

SEQ ID NO: 5534 - RNA, 22 nt, synthetic construct
  source 1..22: mol_type = other RNA
gtatttaattctgcttcattag

SEQ ID NO: 5535 - RNA, 22 nt, synthetic construct
  source 1..22: mol_type = other RNA
gtatttagtcaagtttagagtt

SEQ ID NO: 5536 - RNA, 22 nt, synthetic construct
  source 1..22: mol_type = other RNA
gtcaagtttagagttttaacaa

SEQ ID NO: 5537 - RNA, 22 nt, synthetic construct
  source 1..22: mol_type = other RNA
gtcaatacttagcattatgtat

SEQ ID NO: 5538 - RNA, 22 nt, synthetic construct
  source 1..22: mol_type = other RNA
gtcaatgtgacttagtagtcat

SEQ ID NO: 5539 - RNA, 22 nt, synthetic construct
  source 1..22: mol_type = other RNA
gtcacaatctagattataatca

SEQ ID NO: 5540 - RNA, 22 nt, synthetic construct
  source 1..22: mol_type = other RNA
gtcacatatataaaagatatgt

SEQ ID NO: 5541 - RNA, 22 nt, synthetic construct
  source 1..22: mol_type = other RNA
gtcacattgactttaacatgag

SEQ ID NO: 5542 - RNA, 22 nt, synthetic construct
  source 1..22: mol_type = other RNA
gtcaccatataacttgggcact

SEQ ID NO: 5543 - RNA, 22 nt, synthetic construct
  source 1..22: mol_type = other RNA
gtcactgtctatttaagattaa

SEQ ID NO: 5544 - RNA, 22 nt, synthetic construct
  source 1..22: mol_type = other RNA
gtcagattacagtaagaatgaa

SEQ ID NO: 5545 - RNA, 22 nt, synthetic construct
  source 1..22: mol_type = other RNA
gtcagcacagagtatgtgtaaa

SEQ ID NO: 5546 - RNA, 22 nt, synthetic construct
  source 1..22: mol_type = other RNA
gtcaggctgtttaaacgttcag

SEQ ID NO: 5547 - RNA, 22 nt, synthetic construct
  source 1..22: mol_type = other RNA
gtcatctccatttgtttaaaga

SEQ ID NO: 5548 - RNA, 22 nt, synthetic construct
  source 1..22: mol_type = other RNA
gtccaattttgggggaagagag

SEQ ID NO: 5549 - RNA, 22 nt, synthetic construct
  source 1..22: mol_type = other RNA
gtccctaaattatagaaattta

SEQ ID NO: 5550 - RNA, 22 nt, synthetic construct
  source 1..22: mol_type = other RNA
gtcctctgtatttagtcaagtt

SEQ ID NO: 5551 - RNA, 22 nt, synthetic construct
  source 1..22: mol_type = other RNA
gtcctgaaaattatagattatt

SEQ ID NO: 5552 - RNA, 22 nt, synthetic construct
  source 1..22: mol_type = other RNA
gtcgaaattaacgctgattttt

SEQ ID NO: 5553 - RNA, 22 nt, synthetic construct
  source 1..22: mol_type = other RNA
gtcgataaacatgcaagaataa

SEQ ID NO: 5554 - RNA, 22 nt, synthetic construct
  source 1..22: mol_type = other RNA
gtctaataatctggtattaaat

SEQ ID NO: 5555 - RNA, 22 nt, synthetic construct
  source 1..22: mol_type = other RNA
gtctatttaagattaaacatac

SEQ ID NO: 5556 - RNA, 22 nt, synthetic construct
  source 1..22: mol_type = other RNA
gtctgtggtcctgaaaattata

SEQ ID NO: 5557 - RNA, 22 nt, synthetic construct
  source 1..22: mol_type = other RNA
gtctttaaacaaatggagatga

SEQ ID NO: 5558 - RNA, 22 nt, synthetic construct
  source 1..22: mol_type = other RNA
gtgaatcctaagtaaatatttt

SEQ ID NO: 5559 - RNA, 22 nt, synthetic construct
  source 1..22: mol_type = other RNA
gtgaccatctaaaattgattcc

SEQ ID NO: 5560 - RNA, 22 nt, synthetic construct
  source 1..22: mol_type = other RNA
gtgacctacctttgtcaatact

SEQ ID NO: 5561 - RNA, 22 nt, synthetic construct
  source 1..22: mol_type = other RNA
gtgacttagtagtcatctccat

SEQ ID NO: 5562 - RNA, 22 nt, synthetic construct
  source 1..22: mol_type = other RNA
gtgatacctcatgttaaagtca

SEQ ID NO: 5563 - RNA, 22 nt, synthetic construct
  source 1..22: mol_type = other RNA
gtgatactgtggtaaaaaattt

SEQ ID NO: 5564 - RNA, 22 nt, synthetic construct
  source 1..22: mol_type = other RNA
gtgatattagctcatatgatgc

SEQ ID NO: 5565 - RNA, 22 nt, synthetic construct
  source 1..22: mol_type = other RNA
gtgatgtcgataaacatgcaag

SEQ ID NO: 5566 - RNA, 22 nt, synthetic construct
  source 1..22: mol_type = other RNA
gtgatgtgggaatcaattttag

SEQ ID NO: 5567 - RNA, 22 nt, synthetic construct
  source 1..22: mol_type = other RNA
gtgattctaatacattcgtgta

SEQ ID NO: 5568 - RNA, 22 nt, synthetic construct
  source 1..22: mol_type = other RNA
gtgattgtatgtttaatcttaa

SEQ ID NO: 5569 - RNA, 22 nt, synthetic construct
  source 1..22: mol_type = other RNA
gtgcccaagttatatggtgacc

SEQ ID NO: 5570 - RNA, 22 nt, synthetic construct
  source 1..22: mol_type = other RNA
gtgctgacgatttttagttttg

SEQ ID NO: 5571 - RNA, 22 nt, synthetic construct
  source 1..22: mol_type = other RNA
gtggcatcgagttaaagtttat

SEQ ID NO: 5572 - RNA, 22 nt, synthetic construct
  source 1..22: mol_type = other RNA
gtgggaatcaattttagatggt

SEQ ID NO: 5573 - RNA, 22 nt, synthetic construct
  source 1..22: mol_type = other RNA
gtggtaaaaaatttgtatctaa

SEQ ID NO: 5574 - RNA, 22 nt, synthetic construct
  source 1..22: mol_type = other RNA
gtggtcctgaaaattatagatt

SEQ ID NO: 5575 - RNA, 22 nt, synthetic construct
  source 1..22: mol_type = other RNA
gtggtctaataatctggtatta

SEQ ID NO: 5576 - RNA, 22 nt, synthetic construct
  source 1..22: mol_type = other RNA
gtgtaaaaatctgtaatacaaa

SEQ ID NO: 5577 - RNA, 22 nt, synthetic construct
  source 1..22: mol_type = other RNA
gtgtaggttttcaagtagaaat

SEQ ID NO: 5578 - RNA, 22 nt, synthetic construct
  source 1..22: mol_type = other RNA
gttaaaactctaaacttgacta

SEQ ID NO: 5579 - RNA, 22 nt, synthetic construct
  source 1..22: mol_type = other RNA
gttaaaggatatagtgcccaag

SEQ ID NO: 5580 - RNA, 22 nt, synthetic construct
  source 1..22: mol_type = other RNA
gttaaagtcaatgtgacttagt

SEQ ID NO: 5581 - RNA, 22 nt, synthetic construct
  source 1..22: mol_type = other RNA
gttaaagtttatatttccccta

SEQ ID NO: 5582 - RNA, 22 nt, synthetic construct
  source 1..22: mol_type = other RNA
gttaatgtggtctaataatctg

SEQ ID NO: 5583 - RNA, 22 nt, synthetic construct
  source 1..22: mol_type = other RNA
gttaatgtttaaattattgcct

SEQ ID NO: 5584 - RNA, 22 nt, synthetic construct
  source 1..22: mol_type = other RNA
gttaatttcgacagcttagtct

SEQ ID NO: 5585 - RNA, 22 nt, synthetic construct
  source 1..22: mol_type = other RNA
gttacgaggtttatttctactt

SEQ ID NO: 5586 - RNA, 22 nt, synthetic construct
  source 1..22: mol_type = other RNA
gttactgaacgtttaaacagcc

SEQ ID NO: 5587 - RNA, 22 nt, synthetic construct
  source 1..22: mol_type = other RNA
gttatatggtgacctacctttg

SEQ ID NO: 5588 - RNA, 22 nt, synthetic construct
  source 1..22: mol_type = other RNA
gttatgtgattgtatgtttaat

SEQ ID NO: 5589 - RNA, 22 nt, synthetic construct
  source 1..22: mol_type = other RNA
gttatttaataagttcacctat

SEQ ID NO: 5590 - RNA, 22 nt, synthetic construct
  source 1..22: mol_type = other RNA
gttcacctattgattataatct

SEQ ID NO: 5591 - RNA, 22 nt, synthetic construct
  source 1..22: mol_type = other RNA
gttcagtaacttgttacgaggt

SEQ ID NO: 5592 - RNA, 22 nt, synthetic construct
  source 1..22: mol_type = other RNA
gttcattcttactgtaatctga

SEQ ID NO: 5593 - RNA, 22 nt, synthetic construct
  source 1..22: mol_type = other RNA
gttccagaaaagtacaaaataa

SEQ ID NO: 5594 - RNA, 22 nt, synthetic construct
  source 1..22: mol_type = other RNA
gttcgctgtctttaaacaaatg

SEQ ID NO: 5595 - RNA, 22 nt, synthetic construct
  source 1..22: mol_type = other RNA
gttcttaaatgttgtagtatta

SEQ ID NO: 5596 - RNA, 22 nt, synthetic construct
  source 1..22: mol_type = other RNA
gttgtagtattaatttcaaaac

SEQ ID NO: 5597 - RNA, 22 nt, synthetic construct
  source 1..22: mol_type = other RNA
gttgtgatattagctcatatga

SEQ ID NO: 5598 - RNA, 22 nt, synthetic construct
  source 1..22: mol_type = other RNA
gttgtgatgtcgataaacatgc

SEQ ID NO: 5599 - RNA, 22 nt, synthetic construct
  source 1..22: mol_type = other RNA
gtttaaaaaactagtactcttg

SEQ ID NO: 5600 - RNA, 22 nt, synthetic construct
  source 1..22: mol_type = other RNA
gtttaaacagcctgacaagcat

SEQ ID NO: 5601 - RNA, 22 nt, synthetic construct
  source 1..22: mol_type = other RNA
gtttaaacgttcagtaacttgt

SEQ ID NO: 5602 - RNA, 22 nt, synthetic construct
  source 1..22: mol_type = other RNA
gtttaaagacagcgaacttatt

SEQ ID NO: 5603 - RNA, 22 nt, synthetic construct
  source 1..22: mol_type = other RNA
gtttaatcttaaatagacagtg

SEQ ID NO: 5604 - RNA, 22 nt, synthetic construct
  source 1..22: mol_type = other RNA
gtttacatttctcaatcaaaat

SEQ ID NO: 5605 - RNA, 22 nt, synthetic construct
  source 1..22: mol_type = other RNA
gtttagagttttaacaagagta

SEQ ID NO: 5606 - RNA, 22 nt, synthetic construct
  source 1..22: mol_type = other RNA
gtttatatttcccctaaatatg

SEQ ID NO: 5607 - RNA, 22 nt, synthetic construct
  source 1..22: mol_type = other RNA
gtttatcgacatcacaacagat

SEQ ID NO: 5608 - RNA, 22 nt, synthetic construct
  source 1..22: mol_type = other RNA
gtttatttctacttgaaaacct

SEQ ID NO: 5609 - RNA, 22 nt, synthetic construct
  source 1..22: mol_type = other RNA
gttttaaattttgtgatgtggg

SEQ ID NO: 5610 - RNA, 22 nt, synthetic construct
  source 1..22: mol_type = other RNA
gttttaacaagagtactagttt

SEQ ID NO: 5611 - RNA, 22 nt, synthetic construct
  source 1..22: mol_type = other RNA
gttttcaagtagaaataaacct

SEQ ID NO: 5612 - RNA, 22 nt, synthetic construct
  source 1..22: mol_type = other RNA
gttttcatagtattaagtgtta

SEQ ID NO: 5613 - RNA, 22 nt, synthetic construct
  source 1..22: mol_type = other RNA
gttttgaaattaatactacaac

SEQ ID NO: 5614 - RNA, 22 nt, synthetic construct
  source 1..22: mol_type = other RNA
gttttttaaactgggaaagttg

SEQ ID NO: 5615 - RNA, 22 nt, synthetic construct
  source 1..22: mol_type = other RNA
taaaaaactagtactcttgtta

SEQ ID NO: 5616 - RNA, 22 nt, synthetic construct
  source 1..22: mol_type = other RNA
taaaaataaattctgacaagtg

SEQ ID NO: 5617 - RNA, 22 nt, synthetic construct
  source 1..22: mol_type = other RNA
taaaaatcgtcagcacagagta

SEQ ID NO: 5618 - RNA, 22 nt, synthetic construct
  source 1..22: mol_type = other RNA
taaaactctaaacttgactaaa

SEQ ID NO: 5619 - RNA, 22 nt, synthetic construct
  source 1..22: mol_type = other RNA
taaaactgccagtaagaaattt

SEQ ID NO: 5620 - RNA, 22 nt, synthetic construct
  source 1..22: mol_type = other RNA
taaaagatatgtatgatctatg

SEQ ID NO: 5621 - RNA, 22 nt, synthetic construct
  source 1..22: mol_type = other RNA
taaaaggcatcatatgagctaa

SEQ ID NO: 5622 - RNA, 22 nt, synthetic construct
  source 1..22: mol_type = other RNA
taaaataagttcgctgtcttta

SEQ ID NO: 5623 - RNA, 22 nt, synthetic construct
  source 1..22: mol_type = other RNA
taaaattcaataaacaaagacc

SEQ ID NO: 5624 - RNA, 22 nt, synthetic construct
  source 1..22: mol_type = other RNA
taaaattgattcccacatcaca

SEQ ID NO: 5625 - RNA, 22 nt, synthetic construct
  source 1..22: mol_type = other RNA
taaaatttcttactggcagttt

SEQ ID NO: 5626 - RNA, 22 nt, synthetic construct
  source 1..22: mol_type = other RNA
taaacaaagacccagtccctaa

SEQ ID NO: 5627 - RNA, 22 nt, synthetic construct
  source 1..22: mol_type = other RNA
taaacaaatggagatgactact

SEQ ID NO: 5628 - RNA, 22 nt, synthetic construct
  source 1..22: mol_type = other RNA
taaacagcctgacaagcatgta

SEQ ID NO: 5629 - RNA, 22 nt, synthetic construct
  source 1..22: mol_type = other RNA
taaacatacaatcacataacct

SEQ ID NO: 5630 - RNA, 22 nt, synthetic construct
  source 1..22: mol_type = other RNA
taaacatatatacatgcttgtc

SEQ ID NO: 5631 - RNA, 22 nt, synthetic construct
  source 1..22: mol_type = other RNA
taaacattaacctcattccaag

SEQ ID NO: 5632 - RNA, 22 nt, synthetic construct
  source 1..22: mol_type = other RNA
taaacccatttgttaaaggata

SEQ ID NO: 5633 - RNA, 22 nt, synthetic construct
  source 1..22: mol_type = other RNA
taaacctcgtaacaagttactg

SEQ ID NO: 5634 - RNA, 22 nt, synthetic construct
  source 1..22: mol_type = other RNA
taaacggtattctttaaggtta

SEQ ID NO: 5635 - RNA, 22 nt, synthetic construct
  source 1..22: mol_type = other RNA
taaacgttcagtaacttgttac

SEQ ID NO: 5636 - RNA, 22 nt, synthetic construct
  source 1..22: mol_type = other RNA
taaactgatgcttcattttgct

SEQ ID NO: 5637 - RNA, 22 nt, synthetic construct
  source 1..22: mol_type = other RNA
taaactgggaaagttgtgatat

SEQ ID NO: 5638 - RNA, 22 nt, synthetic construct
  source 1..22: mol_type = other RNA
taaacttgactaaatacagagg

SEQ ID NO: 5639 - RNA, 22 nt, synthetic construct
  source 1..22: mol_type = other RNA
taaactttaactcgatgccaca

SEQ ID NO: 5640 - RNA, 22 nt, synthetic construct
  source 1..22: mol_type = other RNA
taaagaataccgtttacatttc

SEQ ID NO: 5641 - RNA, 22 nt, synthetic construct
  source 1..22: mol_type = other RNA
taaagacagcgaacttatttta

SEQ ID NO: 5642 - RNA, 22 nt, synthetic construct
  source 1..22: mol_type = other RNA
taaaggaatcttgtcagattac

SEQ ID NO: 5643 - RNA, 22 nt, synthetic construct
  source 1..22: mol_type = other RNA
taaaggatatagtgcccaagtt

SEQ ID NO: 5644 - RNA, 22 nt, synthetic construct
  source 1..22: mol_type = other RNA
taaagtcaatgtgacttagtag

SEQ ID NO: 5645 - RNA, 22 nt, synthetic construct
  source 1..22: mol_type = other RNA
taaagtcactgtctatttaaga

SEQ ID NO: 5646 - RNA, 22 nt, synthetic construct
  source 1..22: mol_type = other RNA
taaagtttatatttcccctaaa

SEQ ID NO: 5647 - RNA, 22 nt, synthetic construct
  source 1..22: mol_type = other RNA
taaatacagaggactggtaatt

SEQ ID NO: 5648 - RNA, 22 nt, synthetic construct
  source 1..22: mol_type = other RNA
taaatagacagtgactttaaga

SEQ ID NO: 5649 - RNA, 22 nt, synthetic construct
  source 1..22: mol_type = other RNA
taaatatgctgtgattctaata

SEQ ID NO: 5650 - RNA, 22 nt, synthetic construct
  source 1..22: mol_type = other RNA
taaatattttgttccagaaaag

SEQ ID NO: 5651 - RNA, 22 nt, synthetic construct
  source 1..22: mol_type = other RNA
taaatccctaaagattagatac

SEQ ID NO: 5652 - RNA, 22 nt, synthetic construct
  source 1..22: mol_type = other RNA
taaatccctaaatccctaaaga

SEQ ID NO: 5653 - RNA, 22 nt, synthetic construct
  source 1..22: mol_type = other RNA
taaatccttaagagaaagcttg

SEQ ID NO: 5654 - RNA, 22 nt, synthetic construct
  source 1..22: mol_type = other RNA
taaattctgacaagtgatactg

SEQ ID NO: 5655 - RNA, 22 nt, synthetic construct
  source 1..22: mol_type = other RNA
taaatttctataatttagggac

SEQ ID NO: 5656 - RNA, 22 nt, synthetic construct
  source 1..22: mol_type = other RNA
taaattttgtgatgtgggaatc

SEQ ID NO: 5657 - RNA, 22 nt, synthetic construct
  source 1..22: mol_type = other RNA
taacaaataaggtatagtgata

SEQ ID NO: 5658 - RNA, 22 nt, synthetic construct
  source 1..22: mol_type = other RNA
taacaagagtactagtttttta

SEQ ID NO: 5659 - RNA, 22 nt, synthetic construct
  source 1..22: mol_type = other RNA
taacaagttactgaacgtttaa

SEQ ID NO: 5660 - RNA, 22 nt, synthetic construct
  source 1..22: mol_type = other RNA
taacacttaatactatgaaaac

SEQ ID NO: 5661 - RNA, 22 nt, synthetic construct
  source 1..22: mol_type = other RNA
taacatgaggtatcactatacc

SEQ ID NO: 5662 - RNA, 22 nt, synthetic construct
  source 1..22: mol_type = other RNA
taacctcattccaagttaatgt

SEQ ID NO: 5663 - RNA, 22 nt, synthetic construct
  source 1..22: mol_type = other RNA
taaccttaaagaataccgttta

SEQ ID NO: 5664 - RNA, 22 nt, synthetic construct
  source 1..22: mol_type = other RNA
taactcgatgccacaaatatgt

SEQ ID NO: 5665 - RNA, 22 nt, synthetic construct
  source 1..22: mol_type = other RNA
taacttggaatgaggttaatgt

SEQ ID NO: 5666 - RNA, 22 nt, synthetic construct
  source 1..22: mol_type = other RNA
taacttgggcactatatccttt

SEQ ID NO: 5667 - RNA, 22 nt, synthetic construct
  source 1..22: mol_type = other RNA
taacttgttacgaggtttattt

SEQ ID NO: 5668 - RNA, 22 nt, synthetic construct
  source 1..22: mol_type = other RNA
taagaactgtacaattaccagt

SEQ ID NO: 5669 - RNA, 22 nt, synthetic construct
  source 1..22: mol_type = other RNA
taagaatgaacatatttgtggc

SEQ ID NO: 5670 - RNA, 22 nt, synthetic construct
  source 1..22: mol_type = other RNA
taagaattttgattgagaaatg

SEQ ID NO: 5671 - RNA, 22 nt, synthetic construct
  source 1..22: mol_type = other RNA
taagagaaagcttgagaaatag

SEQ ID NO: 5672 - RNA, 22 nt, synthetic construct
  source 1..22: mol_type = other RNA
taagattaaacatacaatcaca

SEQ ID NO: 5673 - RNA, 22 nt, synthetic construct
  source 1..22: mol_type = other RNA
taagctgtcgaaattaacgctg

SEQ ID NO: 5674 - RNA, 22 nt, synthetic construct
  source 1..22: mol_type = other RNA
taaggatttaataccagattat

SEQ ID NO: 5675 - RNA, 22 nt, synthetic construct
  source 1..22: mol_type = other RNA
taaggtatagtgatacctcatg

SEQ ID NO: 5676 - RNA, 22 nt, synthetic construct
  source 1..22: mol_type = other RNA
taaggttatgtgattgtatgtt

SEQ ID NO: 5677 - RNA, 22 nt, synthetic construct
  source 1..22: mol_type = other RNA
taagtaaatattttgttccaga

SEQ ID NO: 5678 - RNA, 22 nt, synthetic construct
  source 1..22: mol_type = other RNA
taagtattgacaaaggtaggtc

SEQ ID NO: 5679 - RNA, 22 nt, synthetic construct
  source 1..22: mol_type = other RNA
taagtcacattgactttaacat

SEQ ID NO: 5680 - RNA, 22 nt, synthetic construct
  source 1..22: mol_type = other RNA
taagttcacctattgattataa

SEQ ID NO: 5681 - RNA, 22 nt, synthetic construct
  source 1..22: mol_type = other RNA
taagttcgctgtctttaaacaa

SEQ ID NO: 5682 - RNA, 22 nt, synthetic construct
  source 1..22: mol_type = other RNA
taataagttcacctattgatta

SEQ ID NO: 5683 - RNA, 22 nt, synthetic construct
  source 1..22: mol_type = other RNA
taataatctggtattaaatcct

SEQ ID NO: 5684 - RNA, 22 nt, synthetic construct
  source 1..22: mol_type = other RNA
taatacagtatttaattctgct

SEQ ID NO: 5685 - RNA, 22 nt, synthetic construct
  source 1..22: mol_type = other RNA
taatacattcgtgtaggttttc

SEQ ID NO: 5686 - RNA, 22 nt, synthetic construct
  source 1..22: mol_type = other RNA
taataccagattattagaccac

SEQ ID NO: 5687 - RNA, 22 nt, synthetic construct
  source 1..22: mol_type = other RNA
taatactacaacatttaagaac

SEQ ID NO: 5688 - RNA, 22 nt, synthetic construct
  source 1..22: mol_type = other RNA
taatatatgagttgcttcctct

SEQ ID NO: 5689 - RNA, 22 nt, synthetic construct
  source 1..22: mol_type = other RNA
taatatcacaactttcccagtt

SEQ ID NO: 5690 - RNA, 22 nt, synthetic construct
  source 1..22: mol_type = other RNA
taatcaataggtgaacttatta

SEQ ID NO: 5691 - RNA, 22 nt, synthetic construct
  source 1..22: mol_type = other RNA
taatctagattgtgaccatcta

SEQ ID NO: 5692 - RNA, 22 nt, synthetic construct
  source 1..22: mol_type = other RNA
taatctataattttcaggacca

SEQ ID NO: 5693 - RNA, 22 nt, synthetic construct
  source 1..22: mol_type = other RNA
taatctgacaagattcctttac

SEQ ID NO: 5694 - RNA, 22 nt, synthetic construct
  source 1..22: mol_type = other RNA
taatctggtattaaatccttaa

SEQ ID NO: 5695 - RNA, 22 nt, synthetic construct
  source 1..22: mol_type = other RNA
taatcttaaatagacagtgact

SEQ ID NO: 5696 - RNA, 22 nt, synthetic construct
  source 1..22: mol_type = other RNA
taatctttagggatttagggat

SEQ ID NO: 5697 - RNA, 22 nt, synthetic construct
  source 1..22: mol_type = other RNA
taatgaagcagaattaaatact

SEQ ID NO: 5698 - RNA, 22 nt, synthetic construct
  source 1..22: mol_type = other RNA
taatgctaagtattgacaaagg

SEQ ID NO: 5699 - RNA, 22 nt, synthetic construct
  source 1..22: mol_type = other RNA
taatgtggtctaataatctggt

SEQ ID NO: 5700 - RNA, 22 nt, synthetic construct
  source 1..22: mol_type = other RNA
taattctgcttcattaggtttc

SEQ ID NO: 5701 - RNA, 22 nt, synthetic construct
  source 1..22: mol_type = other RNA
taattgtaaaggaatcttgtca

SEQ ID NO: 5702 - RNA, 22 nt, synthetic construct
  source 1..22: mol_type = other RNA
taattgtacagttcttaaatgt

SEQ ID NO: 5703 - RNA, 22 nt, synthetic construct
  source 1..22: mol_type = other RNA
taatttaaaatttcttactggc

SEQ ID NO: 5704 - RNA, 22 nt, synthetic construct
  source 1..22: mol_type = other RNA
taatttagggactgggtctttg

SEQ ID NO: 5705 - RNA, 22 nt, synthetic construct
  source 1..22: mol_type = other RNA
taatttcgacagcttagtctgt

SEQ ID NO: 5706 - RNA, 22 nt, synthetic construct
  source 1..22: mol_type = other RNA
taatttggagtaaatgtttgat

SEQ ID NO: 5707 - RNA, 22 nt, synthetic construct
  source 1..22: mol_type = other RNA
taattttcaggaccacagacta

SEQ ID NO: 5708 - RNA, 22 nt, synthetic construct
  source 1..22: mol_type = other RNA
tacaaatttttaaactgatgct

SEQ ID NO: 5709 - RNA, 22 nt, synthetic construct
  source 1..22: mol_type = other RNA
tacaaattttttaccacagtat

SEQ ID NO: 5710 - RNA, 22 nt, synthetic construct
  source 1..22: mol_type = other RNA
tacaacatttaagaactgtaca

SEQ ID NO: 5711 - RNA, 22 nt, synthetic construct
  source 1..22: mol_type = other RNA
tacaatcacataaccttaaaga

SEQ ID NO: 5712 - RNA, 22 nt, synthetic construct
  source 1..22: mol_type = other RNA
tacaattaccagtcctctgtat

SEQ ID NO: 5713 - RNA, 22 nt, synthetic construct
  source 1..22: mol_type = other RNA
tacacatactctgtgctgacga

SEQ ID NO: 5714 - RNA, 22 nt, synthetic construct
  source 1..22: mol_type = other RNA
tacacgaatgtattagaatcac

SEQ ID NO: 5715 - RNA, 22 nt, synthetic construct
  source 1..22: mol_type = other RNA
tacagaggactggtaattgtac

SEQ ID NO: 5716 - RNA, 22 nt, synthetic construct
  source 1..22: mol_type = other RNA
tacagatttttacacatactct

SEQ ID NO: 5717 - RNA, 22 nt, synthetic construct
  source 1..22: mol_type = other RNA
tacagtaagaatgaacatattt

SEQ ID NO: 5718 - RNA, 22 nt, synthetic construct
  source 1..22: mol_type = other RNA
tacagtatttaattctgcttca

SEQ ID NO: 5719 - RNA, 22 nt, synthetic construct
  source 1..22: mol_type = other RNA
tacagttcttaaatgttgtagt

SEQ ID NO: 5720 - RNA, 22 nt, synthetic construct
  source 1..22: mol_type = other RNA
tacataatgctaagtattgaca

SEQ ID NO: 5721 - RNA, 22 nt, synthetic construct
  source 1..22: mol_type = other RNA
tacatgcttgtcaggctgttta

SEQ ID NO: 5722 - RNA, 22 nt, synthetic construct
  source 1..22: mol_type = other RNA
tacattcgtgtaggttttcaag

SEQ ID NO: 5723 - RNA, 22 nt, synthetic construct
  source 1..22: mol_type = other RNA
tacatttctcaatcaaaattct

SEQ ID NO: 5724 - RNA, 22 nt, synthetic construct
  source 1..22: mol_type = other RNA
taccaaaatggctcctctcttc

SEQ ID NO: 5725 - RNA, 22 nt, synthetic construct
  source 1..22: mol_type = other RNA
taccacagtatcacttgtcaga

SEQ ID NO: 5726 - RNA, 22 nt, synthetic construct
  source 1..22: mol_type = other RNA
taccagattattagaccacatt

SEQ ID NO: 5727 - RNA, 22 nt, synthetic construct
  source 1..22: mol_type = other RNA
taccagtcctctgtatttagtc

SEQ ID NO: 5728 - RNA, 22 nt, synthetic construct
  source 1..22: mol_type = other RNA
taccgtttacatttctcaatca

SEQ ID NO: 5729 - RNA, 22 nt, synthetic construct
  source 1..22: mol_type = other RNA
tacctcatgttaaagtcaatgt

SEQ ID NO: 5730 - RNA, 22 nt, synthetic construct
  source 1..22: mol_type = other RNA
tacctttgtcaatacttagcat

SEQ ID NO: 5731 - RNA, 22 nt, synthetic construct
  source 1..22: mol_type = other RNA
tacgaggtttatttctacttga

SEQ ID NO: 5732 - RNA, 22 nt, synthetic construct
  source 1..22: mol_type = other RNA
tactaagtcacattgactttaa

SEQ ID NO: 5733 - RNA, 22 nt, synthetic construct
  source 1..22: mol_type = other RNA
tactacaacatttaagaactgt

SEQ ID NO: 5734 - RNA, 22 nt, synthetic construct
  source 1..22: mol_type = other RNA
tactagttttttaaactgggaa

SEQ ID NO: 5735 - RNA, 22 nt, synthetic construct
  source 1..22: mol_type = other RNA
tactccaaattattttgtagca

SEQ ID NO: 5736 - RNA, 22 nt, synthetic construct
  source 1..22: mol_type = other RNA
tactctgtgctgacgattttta

SEQ ID NO: 5737 - RNA, 22 nt, synthetic construct
  source 1..22: mol_type = other RNA
tactcttgttaaaactctaaac

SEQ ID NO: 5738 - RNA, 22 nt, synthetic construct
  source 1..22: mol_type = other RNA
tactgaacgtttaaacagcctg

SEQ ID NO: 5739 - RNA, 22 nt, synthetic construct
  source 1..22: mol_type = other RNA
tactggcagttttaaaaaatca

SEQ ID NO: 5740 - RNA, 22 nt, synthetic construct
  source 1..22: mol_type = other RNA
tactgtaatctgacaagattcc

SEQ ID NO: 5741 - RNA, 22 nt, synthetic construct
  source 1..22: mol_type = other RNA
tactgtattaaaataagttcgc

SEQ ID NO: 5742 - RNA, 22 nt, synthetic construct
  source 1..22: mol_type = other RNA
tactgtggtaaaaaatttgtat

SEQ ID NO: 5743 - RNA, 22 nt, synthetic construct
  source 1..22: mol_type = other RNA
tacttagcattatgtatttcaa

SEQ ID NO: 5744 - RNA, 22 nt, synthetic construct
  source 1..22: mol_type = other RNA
tacttaggattcacatagatca

SEQ ID NO: 5745 - RNA, 22 nt, synthetic construct
  source 1..22: mol_type = other RNA
tacttgaaaacctacacgaatg

SEQ ID NO: 5746 - RNA, 22 nt, synthetic construct
  source 1..22: mol_type = other RNA
tacttttctggaacaaaatatt

SEQ ID NO: 5747 - RNA, 22 nt, synthetic construct
  source 1..22: mol_type = other RNA
tagaaataaacctcgtaacaag

SEQ ID NO: 5748 - RNA, 22 nt, synthetic construct
  source 1..22: mol_type = other RNA
tagaatcacagcatatttaggg

SEQ ID NO: 5749 - RNA, 22 nt, synthetic construct
  source 1..22: mol_type = other RNA
tagacagtgactttaagataaa

SEQ ID NO: 5750 - RNA, 22 nt, synthetic construct
  source 1..22: mol_type = other RNA
tagaccacattaacttggaatg

SEQ ID NO: 5751 - RNA, 22 nt, synthetic construct
  source 1..22: mol_type = other RNA
tagagacttttattttaaaagg

SEQ ID NO: 5752 - RNA, 22 nt, synthetic construct
  source 1..22: mol_type = other RNA
tagaggaagcaactcatatatt

SEQ ID NO: 5753 - RNA, 22 nt, synthetic construct
  source 1..22: mol_type = other RNA
tagagttttaacaagagtacta

SEQ ID NO: 5754 - RNA, 22 nt, synthetic construct
  source 1..22: mol_type = other RNA
tagatacaaattttttaccaca

SEQ ID NO: 5755 - RNA, 22 nt, synthetic construct
  source 1..22: mol_type = other RNA
tagatggtcacaatctagatta

SEQ ID NO: 5756 - RNA, 22 nt, synthetic construct
  source 1..22: mol_type = other RNA
tagattataatcaataggtgaa

SEQ ID NO: 5757 - RNA, 22 nt, synthetic construct
  source 1..22: mol_type = other RNA
tagattgtgaccatctaaaatt

SEQ ID NO: 5758 - RNA, 22 nt, synthetic construct
  source 1..22: mol_type = other RNA
tagcaaaatgaagcatcagttt

SEQ ID NO: 5759 - RNA, 22 nt, synthetic construct
  source 1..22: mol_type = other RNA
tagctcatatgatgccttttaa

SEQ ID NO: 5760 - RNA, 22 nt, synthetic construct
  source 1..22: mol_type = other RNA
taggattcacatagatcataca

SEQ ID NO: 5761 - RNA, 22 nt, synthetic construct
  source 1..22: mol_type = other RNA
tagggactgggtctttgtttat

SEQ ID NO: 5762 - RNA, 22 nt, synthetic construct
  source 1..22: mol_type = other RNA
tagggatctgttgtgatgtcga

SEQ ID NO: 5763 - RNA, 22 nt, synthetic construct
  source 1..22: mol_type = other RNA
tagggatttagggatctgttgt

SEQ ID NO: 5764 - RNA, 22 nt, synthetic construct
  source 1..22: mol_type = other RNA
tagggatttagggatttaggga

SEQ ID NO: 5765 - RNA, 22 nt, synthetic construct
  source 1..22: mol_type = other RNA
tagggccagaataccaaaatgg

SEQ ID NO: 5766 - RNA, 22 nt, synthetic construct
  source 1..22: mol_type = other RNA
taggggaaatataaactttaac

SEQ ID NO: 5767 - RNA, 22 nt, synthetic construct
  source 1..22: mol_type = other RNA
taggtcaccatataacttgggc

SEQ ID NO: 5768 - RNA, 22 nt, synthetic construct
  source 1..22: mol_type = other RNA
taggtgaacttattaaataact

SEQ ID NO: 5769 - RNA, 22 nt, synthetic construct
  source 1..22: mol_type = other RNA
taggttttcaagtagaaataaa

SEQ ID NO: 5770 - RNA, 22 nt, synthetic construct
  source 1..22: mol_type = other RNA
tagtactcttgttaaaactcta

SEQ ID NO: 5771 - RNA, 22 nt, synthetic construct
  source 1..22: mol_type = other RNA
tagtagtcatctccatttgttt

SEQ ID NO: 5772 - RNA, 22 nt, synthetic construct
  source 1..22: mol_type = other RNA
tagtcaagtttagagttttaac

SEQ ID NO: 5773 - RNA, 22 nt, synthetic construct
  source 1..22: mol_type = other RNA
tagtcatctccatttgtttaaa

SEQ ID NO: 5774 - RNA, 22 nt, synthetic construct
  source 1..22: mol_type = other RNA
tagtctgtggtcctgaaaatta

SEQ ID NO: 5775 - RNA, 22 nt, synthetic construct
  source 1..22: mol_type = other RNA
tagtgatacctcatgttaaagt

SEQ ID NO: 5776 - RNA, 22 nt, synthetic construct
  source 1..22: mol_type = other RNA
tagtgcccaagttatatggtga

SEQ ID NO: 5777 - RNA, 22 nt, synthetic construct
  source 1..22: mol_type = other RNA
tagttttttaaactgggaaagt

SEQ ID NO: 5778 - RNA, 22 nt, synthetic construct
  source 1..22: mol_type = other RNA
tataaactttaactcgatgcca

SEQ ID NO: 5779 - RNA, 22 nt, synthetic construct
  source 1..22: mol_type = other RNA
tataacttgggcactatatcct

SEQ ID NO: 5780 - RNA, 22 nt, synthetic construct
  source 1..22: mol_type = other RNA
tataatcaataggtgaacttat

SEQ ID NO: 5781 - RNA, 22 nt, synthetic construct
  source 1..22: mol_type = other RNA
tataatctagattgtgaccatc

SEQ ID NO: 5782 - RNA, 22 nt, synthetic construct
  source 1..22: mol_type = other RNA
tataatttagggactgggtctt

SEQ ID NO: 5783 - RNA, 22 nt, synthetic construct
  source 1..22: mol_type = other RNA
tataattttcaggaccacagac

SEQ ID NO: 5784 - RNA, 22 nt, synthetic construct
  source 1..22: mol_type = other RNA
tatacatgcttgtcaggctgtt

SEQ ID NO: 5785 - RNA, 22 nt, synthetic construct
  source 1..22: mol_type = other RNA
tatagtgatacctcatgttaaa

SEQ ID NO: 5786 - RNA, 22 nt, synthetic construct
  source 1..22: mol_type = other RNA
tatagtgcccaagttatatggt

SEQ ID NO: 5787 - RNA, 22 nt, synthetic construct
  source 1..22: mol_type = other RNA
tatatacatgcttgtcaggctg

SEQ ID NO: 5788 - RNA, 22 nt, synthetic construct
  source 1..22: mol_type = other RNA
tatatatgacatgtatattgga

SEQ ID NO: 5789 - RNA, 22 nt, synthetic construct
  source 1..22: mol_type = other RNA
tatatcctttaacaaatgggtt

SEQ ID NO: 5790 - RNA, 22 nt, synthetic construct
  source 1..22: mol_type = other RNA
tatatgacatgtatattggata

SEQ ID NO: 5791 - RNA, 22 nt, synthetic construct
  source 1..22: mol_type = other RNA
tatatgagttgcttcctctatt

SEQ ID NO: 5792 - RNA, 22 nt, synthetic construct
  source 1..22: mol_type = other RNA
tatatggtgacctacctttgtc

SEQ ID NO: 5793 - RNA, 22 nt, synthetic construct
  source 1..22: mol_type = other RNA
tatatttcccctaaatatgctg

SEQ ID NO: 5794 - RNA, 22 nt, synthetic construct
  source 1..22: mol_type = other RNA
tatcaaacatttactccaaatt

SEQ ID NO: 5795 - RNA, 22 nt, synthetic construct
  source 1..22: mol_type = other RNA
tatcacaactttcccagtttaa

SEQ ID NO: 5796 - RNA, 22 nt, synthetic construct
  source 1..22: mol_type = other RNA
tatcactataccttatttgtta

SEQ ID NO: 5797 - RNA, 22 nt, synthetic construct
  source 1..22: mol_type = other RNA
tatcacttgtcagaatttattt

SEQ ID NO: 5798 - RNA, 22 nt, synthetic construct
  source 1..22: mol_type = other RNA
tatccaatatacatgtcatata

SEQ ID NO: 5799 - RNA, 22 nt, synthetic construct
  source 1..22: mol_type = other RNA
tatcctttaacaaatgggttta

SEQ ID NO: 5800 - RNA, 22 nt, synthetic construct
  source 1..22: mol_type = other RNA
tatcgacatcacaacagatccc

SEQ ID NO: 5801 - RNA, 22 nt, synthetic construct
  source 1..22: mol_type = other RNA
tatctaatctttagggatttag

SEQ ID NO: 5802 - RNA, 22 nt, synthetic construct
  source 1..22: mol_type = other RNA
tatcttaaagtcactgtctatt

SEQ ID NO: 5803 - RNA, 22 nt, synthetic construct
  source 1..22: mol_type = other RNA
tatgaaacctaatgaagcagaa

SEQ ID NO: 5804 - RNA, 22 nt, synthetic construct
  source 1..22: mol_type = other RNA
tatgacatgtatattggataat

SEQ ID NO: 5805 - RNA, 22 nt, synthetic construct
  source 1..22: mol_type = other RNA
tatgagctaatatcacaacttt

SEQ ID NO: 5806 - RNA, 22 nt, synthetic construct
  source 1..22: mol_type = other RNA
tatgatctatgtgaatcctaag

SEQ ID NO: 5807 - RNA, 22 nt, synthetic construct
  source 1..22: mol_type = other RNA
tatgattttttaaaactgccag

SEQ ID NO: 5808 - RNA, 22 nt, synthetic construct
  source 1..22: mol_type = other RNA
tatgctgtgattctaatacatt

SEQ ID NO: 5809 - RNA, 22 nt, synthetic construct
  source 1..22: mol_type = other RNA
tatggtgacctacctttgtcaa

SEQ ID NO: 5810 - RNA, 22 nt, synthetic construct
  source 1..22: mol_type = other RNA
tatgtatgatctatgtgaatcc

SEQ ID NO: 5811 - RNA, 22 nt, synthetic construct
  source 1..22: mol_type = other RNA
tatgtgaatcctaagtaaatat

SEQ ID NO: 5812 - RNA, 22 nt, synthetic construct
  source 1..22: mol_type = other RNA
tatgtgattgtatgtttaatct

SEQ ID NO: 5813 - RNA, 22 nt, synthetic construct
  source 1..22: mol_type = other RNA
tatgtgtaaaaatctgtaatac

SEQ ID NO: 5814 - RNA, 22 nt, synthetic construct
  source 1..22: mol_type = other RNA
tatgttcattcttactgtaatc

SEQ ID NO: 5815 - RNA, 22 nt, synthetic construct
  source 1..22: mol_type = other RNA
tattaaaataagttcgctgtct

SEQ ID NO: 5816 - RNA, 22 nt, synthetic construct
  source 1..22: mol_type = other RNA
tattaaatccttaagagaaagc

SEQ ID NO: 5817 - RNA, 22 nt, synthetic construct
  source 1..22: mol_type = other RNA
tattacagatttttacacatac

SEQ ID NO: 5818 - RNA, 22 nt, synthetic construct
  source 1..22: mol_type = other RNA
tattagaatcacagcatattta

SEQ ID NO: 5819 - RNA, 22 nt, synthetic construct
  source 1..22: mol_type = other RNA
tattagaccacattaacttgga

SEQ ID NO: 5820 - RNA, 22 nt, synthetic construct
  source 1..22: mol_type = other RNA
tattagctcatatgatgccttt

SEQ ID NO: 5821 - RNA, 22 nt, synthetic construct
  source 1..22: mol_type = other RNA
tattattttgtacttttctgga

SEQ ID NO: 5822 - RNA, 22 nt, synthetic construct
  source 1..22: mol_type = other RNA
tattcttgcatgtttatcgaca

SEQ ID NO: 5823 - RNA, 22 nt, synthetic construct
  source 1..22: mol_type = other RNA
tattctttaaggttatgtgatt

SEQ ID NO: 5824 - RNA, 22 nt, synthetic construct
  source 1..22: mol_type = other RNA
tattgacaaaggtaggtcacca

SEQ ID NO: 5825 - RNA, 22 nt, synthetic construct
  source 1..22: mol_type = other RNA
tatttaataagttcacctattg

SEQ ID NO: 5826 - RNA, 22 nt, synthetic construct
  source 1..22: mol_type = other RNA
tatttaatatatgagttgcttc

SEQ ID NO: 5827 - RNA, 22 nt, synthetic construct
  source 1..22: mol_type = other RNA
tatttaattctgcttcattagg

SEQ ID NO: 5828 - RNA, 22 nt, synthetic construct
  source 1..22: mol_type = other RNA
tatttacttaggattcacatag

SEQ ID NO: 5829 - RNA, 22 nt, synthetic construct
  source 1..22: mol_type = other RNA
tatttaggggaaatataaactt

SEQ ID NO: 5830 - RNA, 22 nt, synthetic construct
  source 1..22: mol_type = other RNA
tatttagtcaagtttagagttt

SEQ ID NO: 5831 - RNA, 22 nt, synthetic construct
  source 1..22: mol_type = other RNA
tatttatgaaacctaatgaagc

SEQ ID NO: 5832 - RNA, 22 nt, synthetic construct
  source 1..22: mol_type = other RNA
tatttcccctaaatatgctgtg

SEQ ID NO: 5833 - RNA, 22 nt, synthetic construct
  source 1..22: mol_type = other RNA
tatttctacttgaaaacctaca

SEQ ID NO: 5834 - RNA, 22 nt, synthetic construct
  source 1..22: mol_type = other RNA
tatttctcaagctttctcttaa

SEQ ID NO: 5835 - RNA, 22 nt, synthetic construct
  source 1..22: mol_type = other RNA
tatttgtggcatcgagttaaag

SEQ ID NO: 5836 - RNA, 22 nt, synthetic construct
  source 1..22: mol_type = other RNA
tattttaaaaggcatcatatga

SEQ ID NO: 5837 - RNA, 22 nt, synthetic construct
  source 1..22: mol_type = other RNA
tattttgcatttgaaattgtcc

SEQ ID NO: 5838 - RNA, 22 nt, synthetic construct
  source 1..22: mol_type = other RNA
tattttgtacttttctggaaca

SEQ ID NO: 5839 - RNA, 22 nt, synthetic construct
  source 1..22: mol_type = other RNA
tattttgtagcaaaatgaagca

SEQ ID NO: 5840 - RNA, 22 nt, synthetic construct
  source 1..22: mol_type = other RNA
tattttgttccagaaaagtaca

SEQ ID NO: 5841 - RNA, 22 nt, synthetic construct
  source 1..22: mol_type = other RNA
tcaaaactaaaaatcgtcagca

SEQ ID NO: 5842 - RNA, 22 nt, synthetic construct
  source 1..22: mol_type = other RNA
tcaaacatttactccaaattat

SEQ ID NO: 5843 - RNA, 22 nt, synthetic construct
  source 1..22: mol_type = other RNA
tcaaattatccaatatacatgt

SEQ ID NO: 5844 - RNA, 22 nt, synthetic construct
  source 1..22: mol_type = other RNA
tcaagctttctcttaaggattt

SEQ ID NO: 5845 - RNA, 22 nt, synthetic construct
  source 1..22: mol_type = other RNA
tcaagtagaaataaacctcgta

SEQ ID NO: 5846 - RNA, 22 nt, synthetic construct
  source 1..22: mol_type = other RNA
tcaagtttagagttttaacaag

SEQ ID NO: 5847 - RNA, 22 nt, synthetic construct
  source 1..22: mol_type = other RNA
tcaataaacaaagacccagtcc

SEQ ID NO: 5848 - RNA, 22 nt, synthetic construct
  source 1..22: mol_type = other RNA
tcaatacttagcattatgtatt

SEQ ID NO: 5849 - RNA, 22 nt, synthetic construct
  source 1..22: mol_type = other RNA
tcaataggtgaacttattaaat

SEQ ID NO: 5850 - RNA, 22 nt, synthetic construct
  source 1..22: mol_type = other RNA
tcaatgtgacttagtagtcatc

SEQ ID NO: 5851 - RNA, 22 nt, synthetic construct
  source 1..22: mol_type = other RNA
tcaattttagatggtcacaatc

SEQ ID NO: 5852 - RNA, 22 nt, synthetic construct
  source 1..22: mol_type = other RNA
tcacaacagatccctaaatccc

SEQ ID NO: 5853 - RNA, 22 nt, synthetic construct
  source 1..22: mol_type = other RNA
tcacaactttcccagtttaaaa

SEQ ID NO: 5854 - RNA, 22 nt, synthetic construct
  source 1..22: mol_type = other RNA
tcacaatctagattataatcaa

SEQ ID NO: 5855 - RNA, 22 nt, synthetic construct
  source 1..22: mol_type = other RNA
tcacagcatatttaggggaaat

SEQ ID NO: 5856 - RNA, 22 nt, synthetic construct
  source 1..22: mol_type = other RNA
tcacataaccttaaagaatacc

SEQ ID NO: 5857 - RNA, 22 nt, synthetic construct
  source 1..22: mol_type = other RNA
tcacatagatcatacatatctt

SEQ ID NO: 5858 - RNA, 22 nt, synthetic construct
  source 1..22: mol_type = other RNA
tcacattgactttaacatgagg

SEQ ID NO: 5859 - RNA, 22 nt, synthetic construct
  source 1..22: mol_type = other RNA
tcaccatataacttgggcacta

SEQ ID NO: 5860 - RNA, 22 nt, synthetic construct
  source 1..22: mol_type = other RNA
tcacctattgattataatctag

SEQ ID NO: 5861 - RNA, 22 nt, synthetic construct
  source 1..22: mol_type = other RNA
tcactataccttatttgttaaa

SEQ ID NO: 5862 - RNA, 22 nt, synthetic construct
  source 1..22: mol_type = other RNA
tcactgtctatttaagattaaa

SEQ ID NO: 5863 - RNA, 22 nt, synthetic construct
  source 1..22: mol_type = other RNA
tcacttgtcagaatttattttt

SEQ ID NO: 5864 - RNA, 22 nt, synthetic construct
  source 1..22: mol_type = other RNA
tcagattacagtaagaatgaac

SEQ ID NO: 5865 - RNA, 22 nt, synthetic construct
  source 1..22: mol_type = other RNA
tcagcacagagtatgtgtaaaa

SEQ ID NO: 5866 - RNA, 22 nt, synthetic construct
  source 1..22: mol_type = other RNA
tcagcgttaatttcgacagctt

SEQ ID NO: 5867 - RNA, 22 nt, synthetic construct
  source 1..22: mol_type = other RNA
tcaggaccacagactaagctgt

SEQ ID NO: 5868 - RNA, 22 nt, synthetic construct
  source 1..22: mol_type = other RNA
tcaggctgtttaaacgttcagt

SEQ ID NO: 5869 - RNA, 22 nt, synthetic construct
  source 1..22: mol_type = other RNA
tcagtaacttgttacgaggttt

SEQ ID NO: 5870 - RNA, 22 nt, synthetic construct
  source 1..22: mol_type = other RNA
tcatatcaaacatttactccaa

SEQ ID NO: 5871 - RNA, 22 nt, synthetic construct
  source 1..22: mol_type = other RNA
tcatatgagctaatatcacaac

SEQ ID NO: 5872 - RNA, 22 nt, synthetic construct
  source 1..22: mol_type = other RNA
tcatatgatgccttttaaaata

SEQ ID NO: 5873 - RNA, 22 nt, synthetic construct
  source 1..22: mol_type = other RNA
tcatctccatttgtttaaagac

SEQ ID NO: 5874 - RNA, 22 nt, synthetic construct
  source 1..22: mol_type = other RNA
tcatgttaaagtcaatgtgact

SEQ ID NO: 5875 - RNA, 22 nt, synthetic construct
  source 1..22: mol_type = other RNA
tcattccaagttaatgtggtct

SEQ ID NO: 5876 - RNA, 22 nt, synthetic construct
  source 1..22: mol_type = other RNA
tcattcttactgtaatctgaca

SEQ ID NO: 5877 - RNA, 22 nt, synthetic construct
  source 1..22: mol_type = other RNA
tccaaattattttgtagcaaaa

SEQ ID NO: 5878 - RNA, 22 nt, synthetic construct
  source 1..22: mol_type = other RNA
tccaagttaatgtggtctaata

SEQ ID NO: 5879 - RNA, 22 nt, synthetic construct
  source 1..22: mol_type = other RNA
tccaatatacatgtcatatata

SEQ ID NO: 5880 - RNA, 22 nt, synthetic construct
  source 1..22: mol_type = other RNA
tccaattttgggggaagagagg

SEQ ID NO: 5881 - RNA, 22 nt, synthetic construct
  source 1..22: mol_type = other RNA
tccagaaaagtacaaaataata

SEQ ID NO: 5882 - RNA, 22 nt, synthetic construct
  source 1..22: mol_type = other RNA
tccatttgtttaaagacagcga

SEQ ID NO: 5883 - RNA, 22 nt, synthetic construct
  source 1..22: mol_type = other RNA
tcccacatcacaaaatttaaaa

SEQ ID NO: 5884 - RNA, 22 nt, synthetic construct
  source 1..22: mol_type = other RNA
tcccagtttaaaaaactagtac

SEQ ID NO: 5885 - RNA, 22 nt, synthetic construct
  source 1..22: mol_type = other RNA
tcccccaaaattggacaatttc

SEQ ID NO: 5886 - RNA, 22 nt, synthetic construct
  source 1..22: mol_type = other RNA
tcccctaaatatgctgtgattc

SEQ ID NO: 5887 - RNA, 22 nt, synthetic construct
  source 1..22: mol_type = other RNA
tccctaaagattagatacaaat

SEQ ID NO: 5888 - RNA, 22 nt, synthetic construct
  source 1..22: mol_type = other RNA
tccctaaatccctaaagattag

SEQ ID NO: 5889 - RNA, 22 nt, synthetic construct
  source 1..22: mol_type = other RNA
tccctaaatccctaaatcccta

SEQ ID NO: 5890 - RNA, 22 nt, synthetic construct
  source 1..22: mol_type = other RNA
tcctaagtaaatattttgttcc

SEQ ID NO: 5891 - RNA, 22 nt, synthetic construct
  source 1..22: mol_type = other RNA
tcctctcttcccccaaaattgg

SEQ ID NO: 5892 - RNA, 22 nt, synthetic construct
  source 1..22: mol_type = other RNA
tcctctgtatttagtcaagttt

SEQ ID NO: 5893 - RNA, 22 nt, synthetic construct
  source 1..22: mol_type = other RNA
tccttaagagaaagcttgagaa

SEQ ID NO: 5894 - RNA, 22 nt, synthetic construct
  source 1..22: mol_type = other RNA
tcctttaacaaatgggtttaat

SEQ ID NO: 5895 - RNA, 22 nt, synthetic construct
  source 1..22: mol_type = other RNA
tcctttacaattatttgttttc

SEQ ID NO: 5896 - RNA, 22 nt, synthetic construct
  source 1..22: mol_type = other RNA
tcgaaattaacgctgatttttt

SEQ ID NO: 5897 - RNA, 22 nt, synthetic construct
  source 1..22: mol_type = other RNA
tcgacagcttagtctgtggtcc

SEQ ID NO: 5898 - RNA, 22 nt, synthetic construct
  source 1..22: mol_type = other RNA
tcgacatcacaacagatcccta

SEQ ID NO: 5899 - RNA, 22 nt, synthetic construct
  source 1..22: mol_type = other RNA
tcgagttaaagtttatatttcc

SEQ ID NO: 5900 - RNA, 22 nt, synthetic construct
  source 1..22: mol_type = other RNA
tcgataaacatgcaagaataat

SEQ ID NO: 5901 - RNA, 22 nt, synthetic construct
  source 1..22: mol_type = other RNA
tcgatgccacaaatatgttcat

SEQ ID NO: 5902 - RNA, 22 nt, synthetic construct
  source 1..22: mol_type = other RNA
tcgctgtctttaaacaaatgga

SEQ ID NO: 5903 - RNA, 22 nt, synthetic construct
  source 1..22: mol_type = other RNA
tcgtaacaagttactgaacgtt

SEQ ID NO: 5904 - RNA, 22 nt, synthetic construct
  source 1..22: mol_type = other RNA
tcgtcagcacagagtatgtgta

SEQ ID NO: 5905 - RNA, 22 nt, synthetic construct
  source 1..22: mol_type = other RNA
tcgtgtaggttttcaagtagaa

SEQ ID NO: 5906 - RNA, 22 nt, synthetic construct
  source 1..22: mol_type = other RNA
tctaaaattgattcccacatca

SEQ ID NO: 5907 - RNA, 22 nt, synthetic construct
  source 1..22: mol_type = other RNA
tctaaacttgactaaatacaga

SEQ ID NO: 5908 - RNA, 22 nt, synthetic construct
  source 1..22: mol_type = other RNA
tctaataatctggtattaaatc

SEQ ID NO: 5909 - RNA, 22 nt, synthetic construct
  source 1..22: mol_type = other RNA
tctaatacattcgtgtaggttt

SEQ ID NO: 5910 - RNA, 22 nt, synthetic construct
  source 1..22: mol_type = other RNA
tctaatctttagggatttaggg

SEQ ID NO: 5911 - RNA, 22 nt, synthetic construct
  source 1..22: mol_type = other RNA
tctacttgaaaacctacacgaa

SEQ ID NO: 5912 - RNA, 22 nt, synthetic construct
  source 1..22: mol_type = other RNA
tctagattataatcaataggtg

SEQ ID NO: 5913 - RNA, 22 nt, synthetic construct
  source 1..22: mol_type = other RNA
tctagattgtgaccatctaaaa

SEQ ID NO: 5914 - RNA, 22 nt, synthetic construct
  source 1..22: mol_type = other RNA
tctataatttagggactgggtc

SEQ ID NO: 5915 - RNA, 22 nt, synthetic construct
  source 1..22: mol_type = other RNA
tctataattttcaggaccacag

SEQ ID NO: 5916 - RNA, 22 nt, synthetic construct
  source 1..22: mol_type = other RNA
tctatgtgaatcctaagtaaat

SEQ ID NO: 5917 - RNA, 22 nt, synthetic construct
  source 1..22: mol_type = other RNA
tctatttctcaagctttctctt

SEQ ID NO: 5918 - RNA, 22 nt, synthetic construct
  source 1..22: mol_type = other RNA
tctcaagctttctcttaaggat

SEQ ID NO: 5919 - RNA, 22 nt, synthetic construct
  source 1..22: mol_type = other RNA
tctccatttgtttaaagacagc

SEQ ID NO: 5920 - RNA, 22 nt, synthetic construct
  source 1..22: mol_type = other RNA
tctcttaaggatttaataccag

SEQ ID NO: 5921 - RNA, 22 nt, synthetic construct
  source 1..22: mol_type = other RNA
tctcttcccccaaaattggaca

SEQ ID NO: 5922 - RNA, 22 nt, synthetic construct
  source 1..22: mol_type = other RNA
tctgacaagattcctttacaat

SEQ ID NO: 5923 - RNA, 22 nt, synthetic construct
  source 1..22: mol_type = other RNA
tctgacaagtgatactgtggta

SEQ ID NO: 5924 - RNA, 22 nt, synthetic construct
  source 1..22: mol_type = other RNA
tctgcttcattaggtttcataa

SEQ ID NO: 5925 - RNA, 22 nt, synthetic construct
  source 1..22: mol_type = other RNA
tctggaacaaaatatttactta

SEQ ID NO: 5926 - RNA, 22 nt, synthetic construct
  source 1..22: mol_type = other RNA
tctggtattaaatccttaagag

SEQ ID NO: 5927 - RNA, 22 nt, synthetic construct
  source 1..22: mol_type = other RNA
tctgtatttagtcaagtttaga

SEQ ID NO: 5928 - RNA, 22 nt, synthetic construct
  source 1..22: mol_type = other RNA
tctgtgctgacgatttttagtt

SEQ ID NO: 5929 - RNA, 22 nt, synthetic construct
  source 1..22: mol_type = other RNA
tctgtggtcctgaaaattatag

SEQ ID NO: 5930 - RNA, 22 nt, synthetic construct
  source 1..22: mol_type = other RNA
tctgttgtgatgtcgataaaca

SEQ ID NO: 5931 - RNA, 22 nt, synthetic construct
  source 1..22: mol_type = other RNA
tcttaaagtcactgtctattta

SEQ ID NO: 5932 - RNA, 22 nt, synthetic construct
  source 1..22: mol_type = other RNA
tcttaaatagacagtgacttta

SEQ ID NO: 5933 - RNA, 22 nt, synthetic construct
  source 1..22: mol_type = other RNA
tcttaaggatttaataccagat

SEQ ID NO: 5934 - RNA, 22 nt, synthetic construct
  source 1..22: mol_type = other RNA
tcttactggcagttttaaaaaa

SEQ ID NO: 5935 - RNA, 22 nt, synthetic construct
  source 1..22: mol_type = other RNA
tcttactgtaatctgacaagat

SEQ ID NO: 5936 - RNA, 22 nt, synthetic construct
  source 1..22: mol_type = other RNA
tcttcccccaaaattggacaat

SEQ ID NO: 5937 - RNA, 22 nt, synthetic construct
  source 1..22: mol_type = other RNA
tcttgcatgtttatcgacatca

SEQ ID NO: 5938 - RNA, 22 nt, synthetic construct
  source 1..22: mol_type = other RNA
tcttgtcagattacagtaagaa

SEQ ID NO: 5939 - RNA, 22 nt, synthetic construct
  source 1..22: mol_type = other RNA
tcttgttaaaactctaaacttg

SEQ ID NO: 5940 - RNA, 22 nt, synthetic construct
  source 1..22: mol_type = other RNA
tctttaaacaaatggagatgac

SEQ ID NO: 5941 - RNA, 22 nt, synthetic construct
  source 1..22: mol_type = other RNA
tctttaaggttatgtgattgta

SEQ ID NO: 5942 - RNA, 22 nt, synthetic construct
  source 1..22: mol_type = other RNA
tctttagggatttagggattta

SEQ ID NO: 5943 - RNA, 22 nt, synthetic construct
  source 1..22: mol_type = other RNA
tgaaaacaaataattgtaaagg

SEQ ID NO: 5944 - RNA, 22 nt, synthetic construct
  source 1..22: mol_type = other RNA
tgaaaacctacacgaatgtatt

SEQ ID NO: 5945 - RNA, 22 nt, synthetic construct
  source 1..22: mol_type = other RNA
tgaaacctaatgaagcagaatt

SEQ ID NO: 5946 - RNA, 22 nt, synthetic construct
  source 1..22: mol_type = other RNA
tgaaatacataatgctaagtat

SEQ ID NO: 5947 - RNA, 22 nt, synthetic construct
  source 1..22: mol_type = other RNA
tgaaattgtccaattttggggg

SEQ ID NO: 5948 - RNA, 22 nt, synthetic construct
  source 1..22: mol_type = other RNA
tgaacatatttgtggcatcgag

SEQ ID NO: 5949 - RNA, 22 nt, synthetic construct
  source 1..22: mol_type = other RNA
tgaacgtttaaacagcctgaca

SEQ ID NO: 5950 - RNA, 22 nt, synthetic construct
  source 1..22: mol_type = other RNA
tgaagcagaattaaatactgta

SEQ ID NO: 5951 - RNA, 22 nt, synthetic construct
  source 1..22: mol_type = other RNA
tgaagcatcagtttaaaaattt

SEQ ID NO: 5952 - RNA, 22 nt, synthetic construct
  source 1..22: mol_type = other RNA
tgaatcctaagtaaatattttg

SEQ ID NO: 5953 - RNA, 22 nt, synthetic construct
  source 1..22: mol_type = other RNA
tgacaaaggtaggtcaccatat

SEQ ID NO: 5954 - RNA, 22 nt, synthetic construct
  source 1..22: mol_type = other RNA
tgacaagattcctttacaatta

SEQ ID NO: 5955 - RNA, 22 nt, synthetic construct
  source 1..22: mol_type = other RNA
tgacaagcatgtatatatgttt

SEQ ID NO: 5956 - RNA, 22 nt, synthetic construct
  source 1..22: mol_type = other RNA
tgacaagtgatactgtggtaaa

SEQ ID NO: 5957 - RNA, 22 nt, synthetic construct
  source 1..22: mol_type = other RNA
tgacatgtatattggataattt

SEQ ID NO: 5958 - RNA, 22 nt, synthetic construct
  source 1..22: mol_type = other RNA
tgaccatctaaaattgattccc

SEQ ID NO: 5959 - RNA, 22 nt, synthetic construct
  source 1..22: mol_type = other RNA
tgacctacctttgtcaatactt

SEQ ID NO: 5960 - RNA, 22 nt, synthetic construct
  source 1..22: mol_type = other RNA
tgacgatttttagttttgaaat

SEQ ID NO: 5961 - RNA, 22 nt, synthetic construct
  source 1..22: mol_type = other RNA
tgactaaatacagaggactggt

SEQ ID NO: 5962 - RNA, 22 nt, synthetic construct
  source 1..22: mol_type = other RNA
tgactactaagtcacattgact

SEQ ID NO: 5963 - RNA, 22 nt, synthetic construct
  source 1..22: mol_type = other RNA
tgacttagtagtcatctccatt

SEQ ID NO: 5964 - RNA, 22 nt, synthetic construct
  source 1..22: mol_type = other RNA
tgactttaacatgaggtatcac

SEQ ID NO: 5965 - RNA, 22 nt, synthetic construct
  source 1..22: mol_type = other RNA
tgagaaatgtaaacggtattct

SEQ ID NO: 5966 - RNA, 22 nt, synthetic construct
  source 1..22: mol_type = other RNA
tgagctaatatcacaactttcc

SEQ ID NO: 5967 - RNA, 22 nt, synthetic construct
  source 1..22: mol_type = other RNA
tgaggcaaatttaaaaggcaat

SEQ ID NO: 5968 - RNA, 22 nt, synthetic construct
  source 1..22: mol_type = other RNA
tgaggtatcactataccttatt

SEQ ID NO: 5969 - RNA, 22 nt, synthetic construct
  source 1..22: mol_type = other RNA
tgatacctcatgttaaagtcaa

SEQ ID NO: 5970 - RNA, 22 nt, synthetic construct
  source 1..22: mol_type = other RNA
tgatactgtggtaaaaaatttg

SEQ ID NO: 5971 - RNA, 22 nt, synthetic construct
  source 1..22: mol_type = other RNA
tgatattagctcatatgatgcc

SEQ ID NO: 5972 - RNA, 22 nt, synthetic construct
  source 1..22: mol_type = other RNA
tgatctatgtgaatcctaagta

SEQ ID NO: 5973 - RNA, 22 nt, synthetic construct
  source 1..22: mol_type = other RNA
tgatgccttttaaaataaaagt

SEQ ID NO: 5974 - RNA, 22 nt, synthetic construct
  source 1..22: mol_type = other RNA
tgatgcttcattttgctacaaa

SEQ ID NO: 5975 - RNA, 22 nt, synthetic construct
  source 1..22: mol_type = other RNA
tgatgtcgataaacatgcaaga

SEQ ID NO: 5976 - RNA, 22 nt, synthetic construct
  source 1..22: mol_type = other RNA
tgatgtgggaatcaattttaga

SEQ ID NO: 5977 - RNA, 22 nt, synthetic construct
  source 1..22: mol_type = other RNA
tgattataatctagattgtgac

SEQ ID NO: 5978 - RNA, 22 nt, synthetic construct
  source 1..22: mol_type = other RNA
tgattcccacatcacaaaattt

SEQ ID NO: 5979 - RNA, 22 nt, synthetic construct
  source 1..22: mol_type = other RNA
tgattctaatacattcgtgtag

SEQ ID NO: 5980 - RNA, 22 nt, synthetic construct
  source 1..22: mol_type = other RNA
tgattgagaaatgtaaacggta

SEQ ID NO: 5981 - RNA, 22 nt, synthetic construct
  source 1..22: mol_type = other RNA
tgattttttaaaactgccagta

SEQ ID NO: 5982 - RNA, 22 nt, synthetic construct
  source 1..22: mol_type = other RNA
tgcatgtttatcgacatcacaa

SEQ ID NO: 5983 - RNA, 22 nt, synthetic construct
  source 1..22: mol_type = other RNA
tgcatttgaaattgtccaattt

SEQ ID NO: 5984 - RNA, 22 nt, synthetic construct
  source 1..22: mol_type = other RNA
tgccacaaatatgttcattctt

SEQ ID NO: 5985 - RNA, 22 nt, synthetic construct
  source 1..22: mol_type = other RNA
tgccagtaagaaattttaaatt

SEQ ID NO: 5986 - RNA, 22 nt, synthetic construct
  source 1..22: mol_type = other RNA
tgcccaagttatatggtgacct

SEQ ID NO: 5987 - RNA, 22 nt, synthetic construct
  source 1..22: mol_type = other RNA
tgccttttaaaataaaagtctc

SEQ ID NO: 5988 - RNA, 22 nt, synthetic construct
  source 1..22: mol_type = other RNA
tgctaagtattgacaaaggtag

SEQ ID NO: 5989 - RNA, 22 nt, synthetic construct
  source 1..22: mol_type = other RNA
tgctacaaaataatttggagta

SEQ ID NO: 5990 - RNA, 22 nt, synthetic construct
  source 1..22: mol_type = other RNA
tgctgacgatttttagttttga

SEQ ID NO: 5991 - RNA, 22 nt, synthetic construct
  source 1..22: mol_type = other RNA
tgctgtgattctaatacattcg

SEQ ID NO: 5992 - RNA, 22 nt, synthetic construct
  source 1..22: mol_type = other RNA
tgcttcattaggtttcataaat

SEQ ID NO: 5993 - RNA, 22 nt, synthetic construct
  source 1..22: mol_type = other RNA
tgcttcattttgctacaaaata

SEQ ID NO: 5994 - RNA, 22 nt, synthetic construct
  source 1..22: mol_type = other RNA
tgcttgtcaggctgtttaaacg

SEQ ID NO: 5995 - RNA, 22 nt, synthetic construct
  source 1..22: mol_type = other RNA
tggaacaaaatatttacttagg

SEQ ID NO: 5996 - RNA, 22 nt, synthetic construct
  source 1..22: mol_type = other RNA
tggaatgaggttaatgtttaaa

SEQ ID NO: 5997 - RNA, 22 nt, synthetic construct
  source 1..22: mol_type = other RNA
tggacaatttcaaatgcaaaat

SEQ ID NO: 5998 - RNA, 22 nt, synthetic construct
  source 1..22: mol_type = other RNA
tggagatgactactaagtcaca

SEQ ID NO: 5999 - RNA, 22 nt, synthetic construct
  source 1..22: mol_type = other RNA
tggagtaaatgtttgatatgat

SEQ ID NO: 6000 - RNA, 22 nt, synthetic construct
  source 1..22: mol_type = other RNA
tggcagttttaaaaaatcatat

SEQ ID NO: 6001 - RNA, 22 nt, synthetic construct
  source 1..22: mol_type = other RNA
tggcatcgagttaaagtttata

SEQ ID NO: 6002 - RNA, 22 nt, synthetic construct
  source 1..22: mol_type = other RNA
tggctcctctcttcccccaaaa

SEQ ID NO: 6003 - RNA, 22 nt, synthetic construct
  source 1..22: mol_type = other RNA
tgggaaagttgtgatattagct

SEQ ID NO: 6004 - RNA, 22 nt, synthetic construct
  source 1..22: mol_type = other RNA
tgggaatcaattttagatggtc

SEQ ID NO: 6005 - RNA, 22 nt, synthetic construct
  source 1..22: mol_type = other RNA
tgggcactatatcctttaacaa

SEQ ID NO: 6006 - RNA, 22 nt, synthetic construct
  source 1..22: mol_type = other RNA
tgggggaagagaggagccattt

SEQ ID NO: 6007 - RNA, 22 nt, synthetic construct
  source 1..22: mol_type = other RNA
tgggtctttgtttattgaattt

SEQ ID NO: 6008 - RNA, 22 nt, synthetic construct
  source 1..22: mol_type = other RNA
tggtaattgtacagttcttaaa

SEQ ID NO: 6009 - RNA, 22 nt, synthetic construct
  source 1..22: mol_type = other RNA
tggtattaaatccttaagagaa

SEQ ID NO: 6010 - RNA, 22 nt, synthetic construct
  source 1..22: mol_type = other RNA
tggtcacaatctagattataat

SEQ ID NO: 6011 - RNA, 22 nt, synthetic construct
  source 1..22: mol_type = other RNA
tggtcctgaaaattatagatta

SEQ ID NO: 6012 - RNA, 22 nt, synthetic construct
  source 1..22: mol_type = other RNA
tggtctaataatctggtattaa

SEQ ID NO: 6013 - RNA, 22 nt, synthetic construct
  source 1..22: mol_type = other RNA
tggtgacctacctttgtcaata

SEQ ID NO: 6014 - RNA, 22 nt, synthetic construct
  source 1..22: mol_type = other RNA
tgtaaacggtattctttaaggt

SEQ ID NO: 6015 - RNA, 22 nt, synthetic construct
  source 1..22: mol_type = other RNA
tgtaaaggaatcttgtcagatt

SEQ ID NO: 6016 - RNA, 22 nt, synthetic construct
  source 1..22: mol_type = other RNA
tgtaatctgacaagattccttt

SEQ ID NO: 6017 - RNA, 22 nt, synthetic construct
  source 1..22: mol_type = other RNA
tgtacaattaccagtcctctgt

SEQ ID NO: 6018 - RNA, 22 nt, synthetic construct
  source 1..22: mol_type = other RNA
tgtacagttcttaaatgttgta

SEQ ID NO: 6019 - RNA, 22 nt, synthetic construct
  source 1..22: mol_type = other RNA
tgtacttttctggaacaaaata

SEQ ID NO: 6020 - RNA, 22 nt, synthetic construct
  source 1..22: mol_type = other RNA
tgtagcaaaatgaagcatcagt

SEQ ID NO: 6021 - RNA, 22 nt, synthetic construct
  source 1..22: mol_type = other RNA
tgtaggttttcaagtagaaata

SEQ ID NO: 6022 - RNA, 22 nt, synthetic construct
  source 1..22: mol_type = other RNA
tgtatctaatctttagggattt

SEQ ID NO: 6023 - RNA, 22 nt, synthetic construct
  source 1..22: mol_type = other RNA
tgtatgatctatgtgaatccta

SEQ ID NO: 6024 - RNA, 22 nt, synthetic construct
  source 1..22: mol_type = other RNA
tgtattaaaataagttcgctgt

SEQ ID NO: 6025 - RNA, 22 nt, synthetic construct
  source 1..22: mol_type = other RNA
tgtattacagatttttacacat

SEQ ID NO: 6026 - RNA, 22 nt, synthetic construct
  source 1..22: mol_type = other RNA
tgtattagaatcacagcatatt

SEQ ID NO: 6027 - RNA, 22 nt, synthetic construct
  source 1..22: mol_type = other RNA
tgtatttagtcaagtttagagt

SEQ ID NO: 6028 - RNA, 22 nt, synthetic construct
  source 1..22: mol_type = other RNA
tgtcaatacttagcattatgta

SEQ ID NO: 6029 - RNA, 22 nt, synthetic construct
  source 1..22: mol_type = other RNA
tgtcacatatataaaagatatg

SEQ ID NO: 6030 - RNA, 22 nt, synthetic construct
  source 1..22: mol_type = other RNA
tgtcagattacagtaagaatga

SEQ ID NO: 6031 - RNA, 22 nt, synthetic construct
  source 1..22: mol_type = other RNA
tgtcaggctgtttaaacgttca

SEQ ID NO: 6032 - RNA, 22 nt, synthetic construct
  source 1..22: mol_type = other RNA
tgtccaattttgggggaagaga

SEQ ID NO: 6033 - RNA, 22 nt, synthetic construct
  source 1..22: mol_type = other RNA
tgtcgaaattaacgctgatttt

SEQ ID NO: 6034 - RNA, 22 nt, synthetic construct
  source 1..22: mol_type = other RNA
tgtcgataaacatgcaagaata

SEQ ID NO: 6035 - RNA, 22 nt, synthetic construct
  source 1..22: mol_type = other RNA
tgtctttaaacaaatggagatg

SEQ ID NO: 6036 - RNA, 22 nt, synthetic construct
  source 1..22: mol_type = other RNA
tgtgaatcctaagtaaatattt

SEQ ID NO: 6037 - RNA, 22 nt, synthetic construct
  source 1..22: mol_type = other RNA
tgtgaccatctaaaattgattc

SEQ ID NO: 6038 - RNA, 22 nt, synthetic construct
  source 1..22: mol_type = other RNA
tgtgacttagtagtcatctcca

SEQ ID NO: 6039 - RNA, 22 nt, synthetic construct
  source 1..22: mol_type = other RNA
tgtgatattagctcatatgatg

SEQ ID NO: 6040 - RNA, 22 nt, synthetic construct
  source 1..22: mol_type = other RNA
tgtgatgtcgataaacatgcaa

SEQ ID NO: 6041 - RNA, 22 nt, synthetic construct
  source 1..22: mol_type = other RNA
tgtgatgtgggaatcaatttta

SEQ ID NO: 6042 - RNA, 22 nt, synthetic construct
  source 1..22: mol_type = other RNA
tgtgattctaatacattcgtgt

SEQ ID NO: 6043 - RNA, 22 nt, synthetic construct
  source 1..22: mol_type = other RNA
tgtgattgtatgtttaatctta

SEQ ID NO: 6044 - RNA, 22 nt, synthetic construct
  source 1..22: mol_type = other RNA
tgtgctgacgatttttagtttt

SEQ ID NO: 6045 - RNA, 22 nt, synthetic construct
  source 1..22: mol_type = other RNA
tgtggcatcgagttaaagttta

SEQ ID NO: 6046 - RNA, 22 nt, synthetic construct
  source 1..22: mol_type = other RNA
tgtgggaatcaattttagatgg

SEQ ID NO: 6047 - RNA, 22 nt, synthetic construct
  source 1..22: mol_type = other RNA
tgtggtaaaaaatttgtatcta

SEQ ID NO: 6048 - RNA, 22 nt, synthetic construct
  source 1..22: mol_type = other RNA
tgtggtcctgaaaattatagat

SEQ ID NO: 6049 - RNA, 22 nt, synthetic construct
  source 1..22: mol_type = other RNA
tgtggtctaataatctggtatt

SEQ ID NO: 6050 - RNA, 22 nt, synthetic construct
  source 1..22: mol_type = other RNA
tgtgtaaaaatctgtaatacaa

SEQ ID NO: 6051 - RNA, 22 nt, synthetic construct
  source 1..22: mol_type = other RNA
tgttaaaactctaaacttgact

SEQ ID NO: 6052 - RNA, 22 nt, synthetic construct
  source 1..22: mol_type = other RNA
tgttaaaggatatagtgcccaa

SEQ ID NO: 6053 - RNA, 22 nt, synthetic construct
  source 1..22: mol_type = other RNA
tgttaaagtcaatgtgacttag

SEQ ID NO: 6054 - RNA, 22 nt, synthetic construct
  source 1..22: mol_type = other RNA
tgttacgaggtttatttctact

SEQ ID NO: 6055 - RNA, 22 nt, synthetic construct
  source 1..22: mol_type = other RNA
tgttcattcttactgtaatctg

SEQ ID NO: 6056 - RNA, 22 nt, synthetic construct
  source 1..22: mol_type = other RNA
tgttccagaaaagtacaaaata

SEQ ID NO: 6057 - RNA, 22 nt, synthetic construct
  source 1..22: mol_type = other RNA
tgttgtgatgtcgataaacatg

SEQ ID NO: 6058 - RNA, 22 nt, synthetic construct
  source 1..22: mol_type = other RNA
tgtttaaacgttcagtaacttg

SEQ ID NO: 6059 - RNA, 22 nt, synthetic construct
  source 1..22: mol_type = other RNA
tgtttaaagacagcgaacttat

SEQ ID NO: 6060 - RNA, 22 nt, synthetic construct
  source 1..22: mol_type = other RNA
tgtttaatcttaaatagacagt

SEQ ID NO: 6061 - RNA, 22 nt, synthetic construct
  source 1..22: mol_type = other RNA
tgtttatcgacatcacaacaga

SEQ ID NO: 6062 - RNA, 22 nt, synthetic construct
  source 1..22: mol_type = other RNA
tgttttaaattttgtgatgtgg

SEQ ID NO: 6063 - RNA, 22 nt, synthetic construct
  source 1..22: mol_type = other RNA
tgttttcatagtattaagtgtt

SEQ ID NO: 6064 - RNA, 22 nt, synthetic construct
  source 1..22: mol_type = other RNA
ttaaaaaactagtactcttgtt

SEQ ID NO: 6065 - RNA, 22 nt, synthetic construct
  source 1..22: mol_type = other RNA
ttaaaactctaaacttgactaa

SEQ ID NO: 6066 - RNA, 22 nt, synthetic construct
  source 1..22: mol_type = other RNA
ttaaaactgccagtaagaaatt

SEQ ID NO: 6067 - RNA, 22 nt, synthetic construct
  source 1..22: mol_type = other RNA
ttaaaaggcatcatatgagcta

SEQ ID NO: 6068 - RNA, 22 nt, synthetic construct
  source 1..22: mol_type = other RNA
ttaaaataagttcgctgtcttt

SEQ ID NO: 6069 - RNA, 22 nt, synthetic construct
  source 1..22: mol_type = other RNA
ttaaaatttcttactggcagtt

SEQ ID NO: 6070 - RNA, 22 nt, synthetic construct
  source 1..22: mol_type = other RNA
ttaaacaaatggagatgactac

SEQ ID NO: 6071 - RNA, 22 nt, synthetic construct
  source 1..22: mol_type = other RNA
ttaaacagcctgacaagcatgt

SEQ ID NO: 6072 - RNA, 22 nt, synthetic construct
  source 1..22: mol_type = other RNA
ttaaacatacaatcacataacc

SEQ ID NO: 6073 - RNA, 22 nt, synthetic construct
  source 1..22: mol_type = other RNA
ttaaacatatatacatgcttgt

SEQ ID NO: 6074 - RNA, 22 nt, synthetic construct
  source 1..22: mol_type = other RNA
ttaaacattaacctcattccaa

SEQ ID NO: 6075 - RNA, 22 nt, synthetic construct
  source 1..22: mol_type = other RNA
ttaaacccatttgttaaaggat

SEQ ID NO: 6076 - RNA, 22 nt, synthetic construct
  source 1..22: mol_type = other RNA
ttaaacgttcagtaacttgtta

SEQ ID NO: 6077 - RNA, 22 nt, synthetic construct
  source 1..22: mol_type = other RNA
ttaaactgatgcttcattttgc

SEQ ID NO: 6078 - RNA, 22 nt, synthetic construct
  source 1..22: mol_type = other RNA
ttaaactgggaaagttgtgata

SEQ ID NO: 6079 - RNA, 22 nt, synthetic construct
  source 1..22: mol_type = other RNA
ttaaagaataccgtttacattt

SEQ ID NO: 6080 - RNA, 22 nt, synthetic construct
  source 1..22: mol_type = other RNA
ttaaagacagcgaacttatttt

SEQ ID NO: 6081 - RNA, 22 nt, synthetic construct
  source 1..22: mol_type = other RNA
ttaaaggatatagtgcccaagt

SEQ ID NO: 6082 - RNA, 22 nt, synthetic construct
  source 1..22: mol_type = other RNA
ttaaagtcaatgtgacttagta

SEQ ID NO: 6083 - RNA, 22 nt, synthetic construct
  source 1..22: mol_type = other RNA
ttaaagtcactgtctatttaag

SEQ ID NO: 6084 - RNA, 22 nt, synthetic construct
  source 1..22: mol_type = other RNA
ttaaagtttatatttcccctaa

SEQ ID NO: 6085 - RNA, 22 nt, synthetic construct
  source 1..22: mol_type = other RNA
ttaaatagacagtgactttaag

SEQ ID NO: 6086 - RNA, 22 nt, synthetic construct
  source 1..22: mol_type = other RNA
ttaaatccttaagagaaagctt

SEQ ID NO: 6087 - RNA, 22 nt, synthetic construct
  source 1..22: mol_type = other RNA
ttaaattttgtgatgtgggaat

SEQ ID NO: 6088 - RNA, 22 nt, synthetic construct
  source 1..22: mol_type = other RNA
ttaacaaataaggtatagtgat

SEQ ID NO: 6089 - RNA, 22 nt, synthetic construct
  source 1..22: mol_type = other RNA
ttaacaagagtactagtttttt

SEQ ID NO: 6090 - RNA, 22 nt, synthetic construct
  source 1..22: mol_type = other RNA
ttaacatgaggtatcactatac

SEQ ID NO: 6091 - RNA, 22 nt, synthetic construct
  source 1..22: mol_type = other RNA
ttaacctcattccaagttaatg

SEQ ID NO: 6092 - RNA, 22 nt, synthetic construct
  source 1..22: mol_type = other RNA
ttaactcgatgccacaaatatg

SEQ ID NO: 6093 - RNA, 22 nt, synthetic construct
  source 1..22: mol_type = other RNA
ttaacttggaatgaggttaatg

SEQ ID NO: 6094 - RNA, 22 nt, synthetic construct
  source 1..22: mol_type = other RNA
ttaagaactgtacaattaccag

SEQ ID NO: 6095 - RNA, 22 nt, synthetic construct
  source 1..22: mol_type = other RNA
ttaagagaaagcttgagaaata

SEQ ID NO: 6096 - RNA, 22 nt, synthetic construct
  source 1..22: mol_type = other RNA
ttaagattaaacatacaatcac

SEQ ID NO: 6097 - RNA, 22 nt, synthetic construct
  source 1..22: mol_type = other RNA
ttaaggatttaataccagatta

SEQ ID NO: 6098 - RNA, 22 nt, synthetic construct
  source 1..22: mol_type = other RNA
ttaaggttatgtgattgtatgt

SEQ ID NO: 6099 - RNA, 22 nt, synthetic construct
  source 1..22: mol_type = other RNA
ttaataagttcacctattgatt

SEQ ID NO: 6100 - RNA, 22 nt, synthetic construct
  source 1..22: mol_type = other RNA
ttaatacagtatttaattctgc

SEQ ID NO: 6101 - RNA, 22 nt, synthetic construct
  source 1..22: mol_type = other RNA
ttaataccagattattagacca

SEQ ID NO: 6102 - RNA, 22 nt, synthetic construct
  source 1..22: mol_type = other RNA
ttaatatatgagttgcttcctc

SEQ ID NO: 6103 - RNA, 22 nt, synthetic construct
  source 1..22: mol_type = other RNA
ttaatcttaaatagacagtgac

SEQ ID NO: 6104 - RNA, 22 nt, synthetic construct
  source 1..22: mol_type = other RNA
ttaatgtggtctaataatctgg

SEQ ID NO: 6105 - RNA, 22 nt, synthetic construct
  source 1..22: mol_type = other RNA
ttaattctgcttcattaggttt

SEQ ID NO: 6106 - RNA, 22 nt, synthetic construct
  source 1..22: mol_type = other RNA
ttaatttcgacagcttagtctg

SEQ ID NO: 6107 - RNA, 22 nt, synthetic construct
  source 1..22: mol_type = other RNA
ttacacatactctgtgctgacg

SEQ ID NO: 6108 - RNA, 22 nt, synthetic construct
  source 1..22: mol_type = other RNA
ttacagatttttacacatactc

SEQ ID NO: 6109 - RNA, 22 nt, synthetic construct
  source 1..22: mol_type = other RNA
ttacagtaagaatgaacatatt

SEQ ID NO: 6110 - RNA, 22 nt, synthetic construct
  source 1..22: mol_type = other RNA
ttacatttctcaatcaaaattc

SEQ ID NO: 6111 - RNA, 22 nt, synthetic construct
  source 1..22: mol_type = other RNA
ttaccacagtatcacttgtcag

SEQ ID NO: 6112 - RNA, 22 nt, synthetic construct
  source 1..22: mol_type = other RNA
ttaccagtcctctgtatttagt

SEQ ID NO: 6113 - RNA, 22 nt, synthetic construct
  source 1..22: mol_type = other RNA
ttacgaggtttatttctacttg

SEQ ID NO: 6114 - RNA, 22 nt, synthetic construct
  source 1..22: mol_type = other RNA
ttactccaaattattttgtagc

SEQ ID NO: 6115 - RNA, 22 nt, synthetic construct
  source 1..22: mol_type = other RNA
ttactgaacgtttaaacagcct

SEQ ID NO: 6116 - RNA, 22 nt, synthetic construct
  source 1..22: mol_type = other RNA
ttactggcagttttaaaaaatc

SEQ ID NO: 6117 - RNA, 22 nt, synthetic construct
  source 1..22: mol_type = other RNA
ttactgtaatctgacaagattc

SEQ ID NO: 6118 - RNA, 22 nt, synthetic construct
  source 1..22: mol_type = other RNA
ttacttaggattcacatagatc

SEQ ID NO: 6119 - RNA, 22 nt, synthetic construct
  source 1..22: mol_type = other RNA
ttagaatcacagcatatttagg

SEQ ID NO: 6120 - RNA, 22 nt, synthetic construct
  source 1..22: mol_type = other RNA
ttagaccacattaacttggaat

SEQ ID NO: 6121 - RNA, 22 nt, synthetic construct
  source 1..22: mol_type = other RNA
ttagagttttaacaagagtact

SEQ ID NO: 6122 - RNA, 22 nt, synthetic construct
  source 1..22: mol_type = other RNA
ttagatacaaattttttaccac

SEQ ID NO: 6123 - RNA, 22 nt, synthetic construct
  source 1..22: mol_type = other RNA
ttagatggtcacaatctagatt

SEQ ID NO: 6124 - RNA, 22 nt, synthetic construct
  source 1..22: mol_type = other RNA
ttagctcatatgatgcctttta

SEQ ID NO: 6125 - RNA, 22 nt, synthetic construct
  source 1..22: mol_type = other RNA
ttaggattcacatagatcatac

SEQ ID NO: 6126 - RNA, 22 nt, synthetic construct
  source 1..22: mol_type = other RNA
ttagggactgggtctttgttta

SEQ ID NO: 6127 - RNA, 22 nt, synthetic construct
  source 1..22: mol_type = other RNA
ttagggatctgttgtgatgtcg

SEQ ID NO: 6128 - RNA, 22 nt, synthetic construct
  source 1..22: mol_type = other RNA
ttagggatttagggatctgttg

SEQ ID NO: 6129 - RNA, 22 nt, synthetic construct
  source 1..22: mol_type = other RNA
ttagggatttagggatttaggg

SEQ ID NO: 6130 - RNA, 22 nt, synthetic construct
  source 1..22: mol_type = other RNA
ttagggccagaataccaaaatg

SEQ ID NO: 6131 - RNA, 22 nt, synthetic construct
  source 1..22: mol_type = other RNA
ttaggggaaatataaactttaa

SEQ ID NO: 6132 - RNA, 22 nt, synthetic construct
  source 1..22: mol_type = other RNA
ttagtagtcatctccatttgtt

SEQ ID NO: 6133 - RNA, 22 nt, synthetic construct
  source 1..22: mol_type = other RNA
ttagtcaagtttagagttttaa

SEQ ID NO: 6134 - RNA, 22 nt, synthetic construct
  source 1..22: mol_type = other RNA
ttagtctgtggtcctgaaaatt

SEQ ID NO: 6135 - RNA, 22 nt, synthetic construct
  source 1..22: mol_type = other RNA
ttataatcaataggtgaactta

SEQ ID NO: 6136 - RNA, 22 nt, synthetic construct
  source 1..22: mol_type = other RNA
ttataatctagattgtgaccat

SEQ ID NO: 6137 - RNA, 22 nt, synthetic construct
  source 1..22: mol_type = other RNA
ttatatggtgacctacctttgt

SEQ ID NO: 6138 - RNA, 22 nt, synthetic construct
  source 1..22: mol_type = other RNA
ttatatttcccctaaatatgct

SEQ ID NO: 6139 - RNA, 22 nt, synthetic construct
  source 1..22: mol_type = other RNA
ttatccaatatacatgtcatat

SEQ ID NO: 6140 - RNA, 22 nt, synthetic construct
  source 1..22: mol_type = other RNA
ttatcgacatcacaacagatcc

SEQ ID NO: 6141 - RNA, 22 nt, synthetic construct
  source 1..22: mol_type = other RNA
ttatcttaaagtcactgtctat

SEQ ID NO: 6142 - RNA, 22 nt, synthetic construct
  source 1..22: mol_type = other RNA
ttatgaaacctaatgaagcaga

SEQ ID NO: 6143 - RNA, 22 nt, synthetic construct
  source 1..22: mol_type = other RNA
ttatgtgattgtatgtttaatc

SEQ ID NO: 6144 - RNA, 22 nt, synthetic construct
  source 1..22: mol_type = other RNA
ttattagaccacattaacttgg

SEQ ID NO: 6145 - RNA, 22 nt, synthetic construct
  source 1..22: mol_type = other RNA
ttattattttgtacttttctgg

SEQ ID NO: 6146 - RNA, 22 nt, synthetic construct
  source 1..22: mol_type = other RNA
ttattcttgcatgtttatcgac

SEQ ID NO: 6147 - RNA, 22 nt, synthetic construct
  source 1..22: mol_type = other RNA
ttatttatgaaacctaatgaag

SEQ ID NO: 6148 - RNA, 22 nt, synthetic construct
  source 1..22: mol_type = other RNA
ttatttctacttgaaaacctac

SEQ ID NO: 6149 - RNA, 22 nt, synthetic construct
  source 1..22: mol_type = other RNA
ttattttaaaaggcatcatatg

SEQ ID NO: 6150 - RNA, 22 nt, synthetic construct
  source 1..22: mol_type = other RNA
ttattttgcatttgaaattgtc

SEQ ID NO: 6151 - RNA, 22 nt, synthetic construct
  source 1..22: mol_type = other RNA
ttattttgtacttttctggaac

SEQ ID NO: 6152 - RNA, 22 nt, synthetic construct
  source 1..22: mol_type = other RNA
ttattttgtagcaaaatgaagc

SEQ ID NO: 6153 - RNA, 22 nt, synthetic construct
  source 1..22: mol_type = other RNA
ttcaaaactaaaaatcgtcagc

SEQ ID NO: 6154 - RNA, 22 nt, synthetic construct
  source 1..22: mol_type = other RNA
ttcaaattatccaatatacatg

SEQ ID NO: 6155 - RNA, 22 nt, synthetic construct
  source 1..22: mol_type = other RNA
ttcaagtagaaataaacctcgt

SEQ ID NO: 6156 - RNA, 22 nt, synthetic construct
  source 1..22: mol_type = other RNA
ttcaataaacaaagacccagtc

SEQ ID NO: 6157 - RNA, 22 nt, synthetic construct
  source 1..22: mol_type = other RNA
ttcacatagatcatacatatct

SEQ ID NO: 6158 - RNA, 22 nt, synthetic construct
  source 1..22: mol_type = other RNA
ttcacctattgattataatcta

SEQ ID NO: 6159 - RNA, 22 nt, synthetic construct
  source 1..22: mol_type = other RNA
ttcaggaccacagactaagctg

SEQ ID NO: 6160 - RNA, 22 nt, synthetic construct
  source 1..22: mol_type = other RNA
ttcagtaacttgttacgaggtt

SEQ ID NO: 6161 - RNA, 22 nt, synthetic construct
  source 1..22: mol_type = other RNA
ttcattcttactgtaatctgac

SEQ ID NO: 6162 - RNA, 22 nt, synthetic construct
  source 1..22: mol_type = other RNA
ttccaagttaatgtggtctaat

SEQ ID NO: 6163 - RNA, 22 nt, synthetic construct
  source 1..22: mol_type = other RNA
ttccagaaaagtacaaaataat

SEQ ID NO: 6164 - RNA, 22 nt, synthetic construct
  source 1..22: mol_type = other RNA
ttcccacatcacaaaatttaaa

SEQ ID NO: 6165 - RNA, 22 nt, synthetic construct
  source 1..22: mol_type = other RNA
ttcccagtttaaaaaactagta

SEQ ID NO: 6166 - RNA, 22 nt, synthetic construct
  source 1..22: mol_type = other RNA
ttcccccaaaattggacaattt

SEQ ID NO: 6167 - RNA, 22 nt, synthetic construct
  source 1..22: mol_type = other RNA
ttcccctaaatatgctgtgatt

SEQ ID NO: 6168 - RNA, 22 nt, synthetic construct
  source 1..22: mol_type = other RNA
ttcgacagcttagtctgtggtc

SEQ ID NO: 6169 - RNA, 22 nt, synthetic construct
  source 1..22: mol_type = other RNA
ttcgctgtctttaaacaaatgg

SEQ ID NO: 6170 - RNA, 22 nt, synthetic construct
  source 1..22: mol_type = other RNA
ttcgtgtaggttttcaagtaga

SEQ ID NO: 6171 - RNA, 22 nt, synthetic construct
  source 1..22: mol_type = other RNA
ttctaatacattcgtgtaggtt

SEQ ID NO: 6172 - RNA, 22 nt, synthetic construct
  source 1..22: mol_type = other RNA
ttctacttgaaaacctacacga

SEQ ID NO: 6173 - RNA, 22 nt, synthetic construct
  source 1..22: mol_type = other RNA
ttctataatttagggactgggt

SEQ ID NO: 6174 - RNA, 22 nt, synthetic construct
  source 1..22: mol_type = other RNA
ttctcaagctttctcttaagga

SEQ ID NO: 6175 - RNA, 22 nt, synthetic construct
  source 1..22: mol_type = other RNA
ttctcttaaggatttaatacca

SEQ ID NO: 6176 - RNA, 22 nt, synthetic construct
  source 1..22: mol_type = other RNA
ttctgacaagtgatactgtggt

SEQ ID NO: 6177 - RNA, 22 nt, synthetic construct
  source 1..22: mol_type = other RNA
ttctgcttcattaggtttcata

SEQ ID NO: 6178 - RNA, 22 nt, synthetic construct
  source 1..22: mol_type = other RNA
ttctggaacaaaatatttactt

SEQ ID NO: 6179 - RNA, 22 nt, synthetic construct
  source 1..22: mol_type = other RNA
ttcttactggcagttttaaaaa

SEQ ID NO: 6180 - RNA, 22 nt, synthetic construct
  source 1..22: mol_type = other RNA
ttcttactgtaatctgacaaga

SEQ ID NO: 6181 - RNA, 22 nt, synthetic construct
  source 1..22: mol_type = other RNA
ttcttgcatgtttatcgacatc

SEQ ID NO: 6182 - RNA, 22 nt, synthetic construct
  source 1..22: mol_type = other RNA
ttctttaaggttatgtgattgt

SEQ ID NO: 6183 - RNA, 22 nt, synthetic construct
  source 1..22: mol_type = other RNA
ttgaaaacctacacgaatgtat

SEQ ID NO: 6184 - RNA, 22 nt, synthetic construct
  source 1..22: mol_type = other RNA
ttgaaatacataatgctaagta

SEQ ID NO: 6185 - RNA, 22 nt, synthetic construct
  source 1..22: mol_type = other RNA
ttgaaattgtccaattttgggg

SEQ ID NO: 6186 - RNA, 22 nt, synthetic construct
  source 1..22: mol_type = other RNA
ttgacaaaggtaggtcaccata

SEQ ID NO: 6187 - RNA, 22 nt, synthetic construct
  source 1..22: mol_type = other RNA
ttgactaaatacagaggactgg

SEQ ID NO: 6188 - RNA, 22 nt, synthetic construct
  source 1..22: mol_type = other RNA
ttgactttaacatgaggtatca

SEQ ID NO: 6189 - RNA, 22 nt, synthetic construct
  source 1..22: mol_type = other RNA
ttgagaaatgtaaacggtattc

SEQ ID NO: 6190 - RNA, 22 nt, synthetic construct
  source 1..22: mol_type = other RNA
ttgattataatctagattgtga

SEQ ID NO: 6191 - RNA, 22 nt, synthetic construct
  source 1..22: mol_type = other RNA
ttgattcccacatcacaaaatt

SEQ ID NO: 6192 - RNA, 22 nt, synthetic construct
  source 1..22: mol_type = other RNA
ttgattgagaaatgtaaacggt

SEQ ID NO: 6193 - RNA, 22 nt, synthetic construct
  source 1..22: mol_type = other RNA
ttgcatgtttatcgacatcaca

SEQ ID NO: 6194 - RNA, 22 nt, synthetic construct
  source 1..22: mol_type = other RNA
ttgcatttgaaattgtccaatt

SEQ ID NO: 6195 - RNA, 22 nt, synthetic construct
  source 1..22: mol_type = other RNA
ttgctacaaaataatttggagt

SEQ ID NO: 6196 - RNA, 22 nt, synthetic construct
  source 1..22: mol_type = other RNA
ttggaatgaggttaatgtttaa

SEQ ID NO: 6197 - RNA, 22 nt, synthetic construct
  source 1..22: mol_type = other RNA
ttggacaatttcaaatgcaaaa

SEQ ID NO: 6198 - RNA, 22 nt, synthetic construct
  source 1..22: mol_type = other RNA
ttggagtaaatgtttgatatga

SEQ ID NO: 6199 - RNA, 22 nt, synthetic construct
  source 1..22: mol_type = other RNA
ttgggcactatatcctttaaca

SEQ ID NO: 6200 - RNA, 22 nt, synthetic construct
  source 1..22: mol_type = other RNA
ttgggggaagagaggagccatt

SEQ ID NO: 6201 - RNA, 22 nt, synthetic construct
  source 1..22: mol_type = other RNA
ttggtattctggccctaaaaaa

SEQ ID NO: 6202 - RNA, 22 nt, synthetic construct
  source 1..22: mol_type = other RNA
ttgtaaaggaatcttgtcagat

SEQ ID NO: 6203 - RNA, 22 nt, synthetic construct
  source 1..22: mol_type = other RNA
ttgtacagttcttaaatgttgt

SEQ ID NO: 6204 - RNA, 22 nt, synthetic construct
  source 1..22: mol_type = other RNA
ttgtacttttctggaacaaaat

SEQ ID NO: 6205 - RNA, 22 nt, synthetic construct
  source 1..22: mol_type = other RNA
ttgtagcaaaatgaagcatcag

SEQ ID NO: 6206 - RNA, 22 nt, synthetic construct
  source 1..22: mol_type = other RNA
ttgtatctaatctttagggatt

SEQ ID NO: 6207 - RNA, 22 nt, synthetic construct
  source 1..22: mol_type = other RNA
ttgtattacagatttttacaca

SEQ ID NO: 6208 - RNA, 22 nt, synthetic construct
  source 1..22: mol_type = other RNA
ttgtcaatacttagcattatgt

SEQ ID NO: 6209 - RNA, 22 nt, synthetic construct
  source 1..22: mol_type = other RNA
ttgtcagattacagtaagaatg

SEQ ID NO: 6210 - RNA, 22 nt, synthetic construct
  source 1..22: mol_type = other RNA
ttgtcaggctgtttaaacgttc

SEQ ID NO: 6211 - RNA, 22 nt, synthetic construct
  source 1..22: mol_type = other RNA
ttgtccaattttgggggaagag

SEQ ID NO: 6212 - RNA, 22 nt, synthetic construct
  source 1..22: mol_type = other RNA
ttgtgaccatctaaaattgatt

SEQ ID NO: 6213 - RNA, 22 nt, synthetic construct
  source 1..22: mol_type = other RNA
ttgtgatattagctcatatgat

SEQ ID NO: 6214 - RNA, 22 nt, synthetic construct
  source 1..22: mol_type = other RNA
ttgtgatgtcgataaacatgca

SEQ ID NO: 6215 - RNA, 22 nt, synthetic construct
  source 1..22: mol_type = other RNA
ttgtgatgtgggaatcaatttt

SEQ ID NO: 6216 - RNA, 22 nt, synthetic construct
  source 1..22: mol_type = other RNA
ttgtggcatcgagttaaagttt

SEQ ID NO: 6217 - RNA, 22 nt, synthetic construct
  source 1..22: mol_type = other RNA
ttgttaaaactctaaacttgac

SEQ ID NO: 6218 - RNA, 22 nt, synthetic construct
  source 1..22: mol_type = other RNA
ttgttaaaggatatagtgccca

SEQ ID NO: 6219 - RNA, 22 nt, synthetic construct
  source 1..22: mol_type = other RNA
ttgttacgaggtttatttctac

SEQ ID NO: 6220 - RNA, 22 nt, synthetic construct
  source 1..22: mol_type = other RNA
ttgttccagaaaagtacaaaat

SEQ ID NO: 6221 - RNA, 22 nt, synthetic construct
  source 1..22: mol_type = other RNA
ttgtttaaagacagcgaactta

SEQ ID NO: 6222 - RNA, 22 nt, synthetic construct
  source 1..22: mol_type = other RNA
ttgttttaaattttgtgatgtg

SEQ ID NO: 6223 - RNA, 22 nt, synthetic construct
  source 1..22: mol_type = other RNA
ttgttttcatagtattaagtgt

SEQ ID NO: 6224 - RNA, 22 nt, synthetic construct
  source 1..22: mol_type = other RNA
tttaaaaaactagtactcttgt

SEQ ID NO: 6225 - RNA, 22 nt, synthetic construct
  source 1..22: mol_type = other RNA
tttaaaactgccagtaagaaat

SEQ ID NO: 6226 - RNA, 22 nt, synthetic construct
  source 1..22: mol_type = other RNA
tttaaaaggcatcatatgagct

SEQ ID NO: 6227 - RNA, 22 nt, synthetic construct
  source 1..22: mol_type = other RNA
tttaaaatttcttactggcagt

SEQ ID NO: 6228 - RNA, 22 nt, synthetic construct
  source 1..22: mol_type = other RNA
tttaaacaaatggagatgacta

SEQ ID NO: 6229 - RNA, 22 nt, synthetic construct
  source 1..22: mol_type = other RNA
tttaaacagcctgacaagcatg

SEQ ID NO: 6230 - RNA, 22 nt, synthetic construct
  source 1..22: mol_type = other RNA
tttaaacatatatacatgcttg

SEQ ID NO: 6231 - RNA, 22 nt, synthetic construct
  source 1..22: mol_type = other RNA
tttaaacattaacctcattcca

SEQ ID NO: 6232 - RNA, 22 nt, synthetic construct
  source 1..22: mol_type = other RNA
tttaaacgttcagtaacttgtt

SEQ ID NO: 6233 - RNA, 22 nt, synthetic construct
  source 1..22: mol_type = other RNA
tttaaactgatgcttcattttg

SEQ ID NO: 6234 - RNA, 22 nt, synthetic construct
  source 1..22: mol_type = other RNA
tttaaactgggaaagttgtgat

SEQ ID NO: 6235 - RNA, 22 nt, synthetic construct
  source 1..22: mol_type = other RNA
tttaaagacagcgaacttattt

SEQ ID NO: 6236 - RNA, 22 nt, synthetic construct
  source 1..22: mol_type = other RNA
tttaaattttgtgatgtgggaa

SEQ ID NO: 6237 - RNA, 22 nt, synthetic construct
  source 1..22: mol_type = other RNA
tttaacaaataaggtatagtga

SEQ ID NO: 6238 - RNA, 22 nt, synthetic construct
  source 1..22: mol_type = other RNA
tttaacaagagtactagttttt

SEQ ID NO: 6239 - RNA, 22 nt, synthetic construct
  source 1..22: mol_type = other RNA
tttaacatgaggtatcactata

SEQ ID NO: 6240 - RNA, 22 nt, synthetic construct
  source 1..22: mol_type = other RNA
tttaactcgatgccacaaatat

SEQ ID NO: 6241 - RNA, 22 nt, synthetic construct
  source 1..22: mol_type = other RNA
tttaagaactgtacaattacca

SEQ ID NO: 6242 - RNA, 22 nt, synthetic construct
  source 1..22: mol_type = other RNA
tttaaggttatgtgattgtatg

SEQ ID NO: 6243 - RNA, 22 nt, synthetic construct
  source 1..22: mol_type = other RNA
tttaataagttcacctattgat

SEQ ID NO: 6244 - RNA, 22 nt, synthetic construct
  source 1..22: mol_type = other RNA
tttaataccagattattagacc

SEQ ID NO: 6245 - RNA, 22 nt, synthetic construct
  source 1..22: mol_type = other RNA
tttaatatatgagttgcttcct

SEQ ID NO: 6246 - RNA, 22 nt, synthetic construct
  source 1..22: mol_type = other RNA
tttaatcttaaatagacagtga

SEQ ID NO: 6247 - RNA, 22 nt, synthetic construct
  source 1..22: mol_type = other RNA
tttaattctgcttcattaggtt

SEQ ID NO: 6248 - RNA, 22 nt, synthetic construct
  source 1..22: mol_type = other RNA
tttacacatactctgtgctgac

SEQ ID NO: 6249 - RNA, 22 nt, synthetic construct
  source 1..22: mol_type = other RNA
tttaccacagtatcacttgtca

SEQ ID NO: 6250 - RNA, 22 nt, synthetic construct
  source 1..22: mol_type = other RNA
tttactccaaattattttgtag

SEQ ID NO: 6251 - RNA, 22 nt, synthetic construct
  source 1..22: mol_type = other RNA
tttacttaggattcacatagat

SEQ ID NO: 6252 - RNA, 22 nt, synthetic construct
  source 1..22: mol_type = other RNA
tttagagttttaacaagagtac

SEQ ID NO: 6253 - RNA, 22 nt, synthetic construct
  source 1..22: mol_type = other RNA
tttagatggtcacaatctagat

SEQ ID NO: 6254 - RNA, 22 nt, synthetic construct
  source 1..22: mol_type = other RNA
tttagggactgggtctttgttt

SEQ ID NO: 6255 - RNA, 22 nt, synthetic construct
  source 1..22: mol_type = other RNA
tttagggatctgttgtgatgtc

SEQ ID NO: 6256 - RNA, 22 nt, synthetic construct
  source 1..22: mol_type = other RNA
tttagggatttagggatctgtt

SEQ ID NO: 6257 - RNA, 22 nt, synthetic construct
  source 1..22: mol_type = other RNA
tttagggatttagggatttagg

SEQ ID NO: 6258 - RNA, 22 nt, synthetic construct
  source 1..22: mol_type = other RNA
tttagggccagaataccaaaat

SEQ ID NO: 6259 - RNA, 22 nt, synthetic construct
  source 1..22: mol_type = other RNA
tttaggggaaatataaacttta

SEQ ID NO: 6260 - RNA, 22 nt, synthetic construct
  source 1..22: mol_type = other RNA
tttagtcaagtttagagtttta

SEQ ID NO: 6261 - RNA, 22 nt, synthetic construct
  source 1..22: mol_type = other RNA
tttatatttcccctaaatatgc

SEQ ID NO: 6262 - RNA, 22 nt, synthetic construct
  source 1..22: mol_type = other RNA
tttatcgacatcacaacagatc

SEQ ID NO: 6263 - RNA, 22 nt, synthetic construct
  source 1..22: mol_type = other RNA
tttatcttaaagtcactgtcta

SEQ ID NO: 6264 - RNA, 22 nt, synthetic construct
  source 1..22: mol_type = other RNA
tttatgaaacctaatgaagcag

SEQ ID NO: 6265 - RNA, 22 nt, synthetic construct
  source 1..22: mol_type = other RNA
tttatttctacttgaaaaccta

SEQ ID NO: 6266 - RNA, 22 nt, synthetic construct
  source 1..22: mol_type = other RNA
tttcaaaactaaaaatcgtcag

SEQ ID NO: 6267 - RNA, 22 nt, synthetic construct
  source 1..22: mol_type = other RNA
tttcaagtagaaataaacctcg

SEQ ID NO: 6268 - RNA, 22 nt, synthetic construct
  source 1..22: mol_type = other RNA
tttcaggaccacagactaagct

SEQ ID NO: 6269 - RNA, 22 nt, synthetic construct
  source 1..22: mol_type = other RNA
tttcccagtttaaaaaactagt

SEQ ID NO: 6270 - RNA, 22 nt, synthetic construct
  source 1..22: mol_type = other RNA
tttcccctaaatatgctgtgat

SEQ ID NO: 6271 - RNA, 22 nt, synthetic construct
  source 1..22: mol_type = other RNA
tttcgacagcttagtctgtggt

SEQ ID NO: 6272 - RNA, 22 nt, synthetic construct
  source 1..22: mol_type = other RNA
tttctacttgaaaacctacacg

SEQ ID NO: 6273 - RNA, 22 nt, synthetic construct
  source 1..22: mol_type = other RNA
tttctataatttagggactggg

SEQ ID NO: 6274 - RNA, 22 nt, synthetic construct
  source 1..22: mol_type = other RNA
tttctcaagctttctcttaagg

SEQ ID NO: 6275 - RNA, 22 nt, synthetic construct
  source 1..22: mol_type = other RNA
tttctcttaaggatttaatacc

SEQ ID NO: 6276 - RNA, 22 nt, synthetic construct
  source 1..22: mol_type = other RNA
tttctggaacaaaatatttact

SEQ ID NO: 6277 - RNA, 22 nt, synthetic construct
  source 1..22: mol_type = other RNA
tttcttactggcagttttaaaa

SEQ ID NO: 6278 - RNA, 22 nt, synthetic construct
  source 1..22: mol_type = other RNA
tttgaaatacataatgctaagt

SEQ ID NO: 6279 - RNA, 22 nt, synthetic construct
  source 1..22: mol_type = other RNA
tttgaaattgtccaattttggg

SEQ ID NO: 6280 - RNA, 22 nt, synthetic construct
  source 1..22: mol_type = other RNA
tttgattgagaaatgtaaacgg

SEQ ID NO: 6281 - RNA, 22 nt, synthetic construct
  source 1..22: mol_type = other RNA
tttgcatttgaaattgtccaat

SEQ ID NO: 6282 - RNA, 22 nt, synthetic construct
  source 1..22: mol_type = other RNA
tttgctacaaaataatttggag

SEQ ID NO: 6283 - RNA, 22 nt, synthetic construct
  source 1..22: mol_type = other RNA
tttggagtaaatgtttgatatg

SEQ ID NO: 6284 - RNA, 22 nt, synthetic construct
  source 1..22: mol_type = other RNA
tttgggggaagagaggagccat

SEQ ID NO: 6285 - RNA, 22 nt, synthetic construct
  source 1..22: mol_type = other RNA
tttggtattctggccctaaaaa

SEQ ID NO: 6286 - RNA, 22 nt, synthetic construct
  source 1..22: mol_type = other RNA
tttgtacttttctggaacaaaa

SEQ ID NO: 6287 - RNA, 22 nt, synthetic construct
  source 1..22: mol_type = other RNA
tttgtagcaaaatgaagcatca

SEQ ID NO: 6288 - RNA, 22 nt, synthetic construct
  source 1..22: mol_type = other RNA
tttgtatctaatctttagggat

SEQ ID NO: 6289 - RNA, 22 nt, synthetic construct
  source 1..22: mol_type = other RNA
tttgtattacagatttttacac

SEQ ID NO: 6290 - RNA, 22 nt, synthetic construct
  source 1..22: mol_type = other RNA
tttgtcaatacttagcattatg

SEQ ID NO: 6291 - RNA, 22 nt, synthetic construct
  source 1..22: mol_type = other RNA
tttgtgatgtgggaatcaattt

SEQ ID NO: 6292 - RNA, 22 nt, synthetic construct
  source 1..22: mol_type = other RNA
tttgtggcatcgagttaaagtt

SEQ ID NO: 6293 - RNA, 22 nt, synthetic construct
  source 1..22: mol_type = other RNA
tttgttaaaggatatagtgccc

SEQ ID NO: 6294 - RNA, 22 nt, synthetic construct
  source 1..22: mol_type = other RNA
tttgttccagaaaagtacaaaa

SEQ ID NO: 6295 - RNA, 22 nt, synthetic construct
  source 1..22: mol_type = other RNA
tttgtttaaagacagcgaactt

SEQ ID NO: 6296 - RNA, 22 nt, synthetic construct
  source 1..22: mol_type = other RNA
tttgttttcatagtattaagtg

SEQ ID NO: 6297 - RNA, 22 nt, synthetic construct
  source 1..22: mol_type = other RNA
ttttaaaactgccagtaagaaa

SEQ ID NO: 6298 - RNA, 22 nt, synthetic construct
  source 1..22: mol_type = other RNA
ttttaaaaggcatcatatgagc

SEQ ID NO: 6299 - RNA, 22 nt, synthetic construct
  source 1..22: mol_type = other RNA
ttttaaactgatgcttcatttt

SEQ ID NO: 6300 - RNA, 22 nt, synthetic construct
  source 1..22: mol_type = other RNA
ttttaaactgggaaagttgtga

SEQ ID NO: 6301 - RNA, 22 nt, synthetic construct
  source 1..22: mol_type = other RNA
ttttaaattttgtgatgtggga

SEQ ID NO: 6302 - RNA, 22 nt, synthetic construct
  source 1..22: mol_type = other RNA
ttttaacaaataaggtatagtg

SEQ ID NO: 6303 - RNA, 22 nt, synthetic construct
  source 1..22: mol_type = other RNA
ttttaacaagagtactagtttt

SEQ ID NO: 6304 - RNA, 22 nt, synthetic construct
  source 1..22: mol_type = other RNA
ttttacacatactctgtgctga

SEQ ID NO: 6305 - RNA, 22 nt, synthetic construct
  source 1..22: mol_type = other RNA
ttttaccacagtatcacttgtc

SEQ ID NO: 6306 - RNA, 22 nt, synthetic construct
  source 1..22: mol_type = other RNA
ttttagatggtcacaatctaga

SEQ ID NO: 6307 - RNA, 22 nt, synthetic construct
  source 1..22: mol_type = other RNA
ttttagggccagaataccaaaa

SEQ ID NO: 6308 - RNA, 22 nt, synthetic construct
  source 1..22: mol_type = other RNA
ttttatcttaaagtcactgtct

SEQ ID NO: 6309 - RNA, 22 nt, synthetic construct
  source 1..22: mol_type = other RNA
ttttcaagtagaaataaacctc

SEQ ID NO: 6310 - RNA, 22 nt, synthetic construct
  source 1..22: mol_type = other RNA
ttttcaggaccacagactaagc

SEQ ID NO: 6311 - RNA, 22 nt, synthetic construct
  source 1..22: mol_type = other RNA
ttttctggaacaaaatatttac

SEQ ID NO: 6312 - RNA, 22 nt, synthetic construct
  source 1..22: mol_type = other RNA
ttttgattgagaaatgtaaacg

SEQ ID NO: 6313 - RNA, 22 nt, synthetic construct
  source 1..22: mol_type = other RNA
ttttgcatttgaaattgtccaa

SEQ ID NO: 6314 - RNA, 22 nt, synthetic construct
  source 1..22: mol_type = other RNA
ttttgctacaaaataatttgga

SEQ ID NO: 6315 - RNA, 22 nt, synthetic construct
  source 1..22: mol_type = other RNA
ttttgggggaagagaggagcca

SEQ ID NO: 6316 - RNA, 22 nt, synthetic construct
  source 1..22: mol_type = other RNA
ttttggtattctggccctaaaa

SEQ ID NO: 6317 - RNA, 22 nt, synthetic construct
  source 1..22: mol_type = other RNA
ttttgtacttttctggaacaaa

SEQ ID NO: 6318 - RNA, 22 nt, synthetic construct
  source 1..22: mol_type = other RNA
ttttgtagcaaaatgaagcatc

SEQ ID NO: 6319 - RNA, 22 nt, synthetic construct
  source 1..22: mol_type = other RNA
ttttgtgatgtgggaatcaatt

SEQ ID NO: 6320 - RNA, 22 nt, synthetic construct
  source 1..22: mol_type = other RNA
ttttgttccagaaaagtacaaa

SEQ ID NO: 6321 - RNA, 22 nt, synthetic construct
  source 1..22: mol_type = other RNA
tttttaaaactgccagtaagaa

SEQ ID NO: 6322 - RNA, 22 nt, synthetic construct
  source 1..22: mol_type = other RNA
tttttaaactgatgcttcattt

SEQ ID NO: 6323 - RNA, 22 nt, synthetic construct
  source 1..22: mol_type = other RNA
tttttaaactgggaaagttgtg

SEQ ID NO: 6324 - RNA, 22 nt, synthetic construct
  source 1..22: mol_type = other RNA
tttttacacatactctgtgctg

SEQ ID NO: 6325 - RNA, 22 nt, synthetic construct
  source 1..22: mol_type = other RNA
tttttaccacagtatcacttgt

SEQ ID NO: 6326 - RNA, 22 nt, synthetic construct
  source 1..22: mol_type = other RNA
tttttagggccagaataccaaa

SEQ ID NO: 6327 - RNA, 22 nt, synthetic construct
  source 1..22: mol_type = other RNA
tttttatcttaaagtcactgtc

SEQ ID NO: 6328 - RNA, 22 nt, synthetic construct
  source 1..22: mol_type = other RNA
ttttttaaaactgccagtaaga

SEQ ID NO: 6329 - RNA, 22 nt, synthetic construct
  source 1..22: mol_type = other RNA
ttttttaaactgggaaagttgt

SEQ ID NO: 6330 - RNA, 22 nt, synthetic construct
  source 1..22: mol_type = other RNA
ttttttaccacagtatcacttg

SEQ ID NO: 6331 - RNA, 22 nt, synthetic construct
  source 1..22: mol_type = other RNA
ttttttagggccagaataccaa

SEQ ID NO: 6332 - RNA, 22 nt, synthetic construct
  source 1..22: mol_type = other RNA
ttttttatcttaaagtcactgt

SEQ ID NO: 6333 - RNA, 20 nt, synthetic construct
  source 1..20: mol_type = other RNA
aaaaaattctacttcaacaa

SEQ ID NO: 6334 - RNA, 20 nt, synthetic construct
  source 1..20: mol_type = other RNA
aaaaactcaacatatttgat

SEQ ID NO: 6335 - RNA, 20 nt, synthetic construct
  source 1..20: mol_type = other RNA
aaaaagaaggagcttaattg

SEQ ID NO: 6336 - RNA, 20 nt, synthetic construct
  source 1..20: mol_type = other RNA
aaaaagactgatcaaatatg

SEQ ID NO: 6337 - RNA, 20 nt, synthetic construct
  source 1..20: mol_type = other RNA
aaaaatgaagaggtaaagaa

SEQ ID NO: 6338 - RNA, 20 nt, synthetic construct
  source 1..20: mol_type = other RNA
aaaaattctacttcaacaaa

SEQ ID NO: 6339 - RNA, 20 nt, synthetic construct
  source 1..20: mol_type = other RNA
aaaaattttagccaatggcc

SEQ ID NO: 6340 - RNA, 20 nt, synthetic construct
  source 1..20: mol_type = other RNA
aaaactcaacatatttgatc

SEQ ID NO: 6341 - RNA, 20 nt, synthetic construct
  source 1..20: mol_type = other RNA
aaaacttgaaagcctcctag

SEQ ID NO: 6342 - RNA, 20 nt, synthetic construct
  source 1..20: mol_type = other RNA
aaaagaaggagcttaattgt

SEQ ID NO: 6343 - RNA, 20 nt, synthetic construct
  source 1..20: mol_type = other RNA
aaaagactgatcaaatatgt

SEQ ID NO: 6344 - RNA, 20 nt, synthetic construct
  source 1..20: mol_type = other RNA
aaaaggaactgagaagaact

SEQ ID NO: 6345 - RNA, 20 nt, synthetic construct
  source 1..20: mol_type = other RNA
aaaagtgaaatatttagaag

SEQ ID NO: 6346 - RNA, 20 nt, synthetic construct
  source 1..20: mol_type = other RNA
aaaatcaacctgaaactcca

SEQ ID NO: 6347 - RNA, 20 nt, synthetic construct
  source 1..20: mol_type = other RNA
aaaatcaagatttgctatgt

SEQ ID NO: 6348 - RNA, 20 nt, synthetic construct
  source 1..20: mol_type = other RNA
aaaatgaagaggtaaagaat

SEQ ID NO: 6349 - RNA, 20 nt, synthetic construct
  source 1..20: mol_type = other RNA
aaaattctacttcaacaaaa

SEQ ID NO: 6350 - RNA, 20 nt, synthetic construct
  source 1..20: mol_type = other RNA
aaaattttagccaatggcct

SEQ ID NO: 6351 - RNA, 20 nt, synthetic construct
  source 1..20: mol_type = other RNA
aaaatttttacatcgtctaa

SEQ ID NO: 6352 - RNA, 20 nt, synthetic construct
  source 1..20: mol_type = other RNA
aaacatgaaccctctttatt

SEQ ID NO: 6353 - RNA, 20 nt, synthetic construct
  source 1..20: mol_type = other RNA
aaaccagtgaaatcaaagaa

SEQ ID NO: 6354 - RNA, 20 nt, synthetic construct
  source 1..20: mol_type = other RNA
aaactacaagtcaaaaatga

SEQ ID NO: 6355 - RNA, 20 nt, synthetic construct
  source 1..20: mol_type = other RNA
aaactcaacatatttgatca

SEQ ID NO: 6356 - RNA, 20 nt, synthetic construct
  source 1..20: mol_type = other RNA
aaactccagaacacccagaa

SEQ ID NO: 6357 - RNA, 20 nt, synthetic construct
  source 1..20: mol_type = other RNA
aaacttgaaagcctcctaga

SEQ ID NO: 6358 - RNA, 20 nt, synthetic construct
  source 1..20: mol_type = other RNA
aaagaagaagaaaaggaact

SEQ ID NO: 6359 - RNA, 20 nt, synthetic construct
  source 1..20: mol_type = other RNA
aaagaatatgtcacttgaac

SEQ ID NO: 6360 - RNA, 20 nt, synthetic construct
  source 1..20: mol_type = other RNA
aaagactgatcaaatatgtt

SEQ ID NO: 6361 - RNA, 20 nt, synthetic construct
  source 1..20: mol_type = other RNA
aaagactttgtccataagac

SEQ ID NO: 6362 - RNA, 20 nt, synthetic construct
  source 1..20: mol_type = other RNA
aaagcctcctagaagaaaaa

SEQ ID NO: 6363 - RNA, 20 nt, synthetic construct
  source 1..20: mol_type = other RNA
aaaggaactgagaagaacta

SEQ ID NO: 6364 - RNA, 20 nt, synthetic construct
  source 1..20: mol_type = other RNA
aaagtaagtagaaaataaag

SEQ ID NO: 6365 - RNA, 20 nt, synthetic construct
  source 1..20: mol_type = other RNA
aaagtctttaagaccatgtc

SEQ ID NO: 6366 - RNA, 20 nt, synthetic construct
  source 1..20: mol_type = other RNA
aaagtgaaatatttagaaga

SEQ ID NO: 6367 - RNA, 20 nt, synthetic construct
  source 1..20: mol_type = other RNA
aaataactagaggaacaata

SEQ ID NO: 6368 - RNA, 20 nt, synthetic construct
  source 1..20: mol_type = other RNA
aaatatgtcattaatttggc

SEQ ID NO: 6369 - RNA, 20 nt, synthetic construct
  source 1..20: mol_type = other RNA
aaatatgttgagtttttgaa

SEQ ID NO: 6370 - RNA, 20 nt, synthetic construct
  source 1..20: mol_type = other RNA
aaatatttagaagagcaact

SEQ ID NO: 6371 - RNA, 20 nt, synthetic construct
  source 1..20: mol_type = other RNA
aaatatttcactttttgttg

SEQ ID NO: 6372 - RNA, 20 nt, synthetic construct
  source 1..20: mol_type = other RNA
aaatcaaagaagaagaaaag

SEQ ID NO: 6373 - RNA, 20 nt, synthetic construct
  source 1..20: mol_type = other RNA
aaatcaacctgaaactccag

SEQ ID NO: 6374 - RNA, 20 nt, synthetic construct
  source 1..20: mol_type = other RNA
aaatcaagatttgctatgtt

SEQ ID NO: 6375 - RNA, 20 nt, synthetic construct
  source 1..20: mol_type = other RNA
aaatcttgattttggctctg

SEQ ID NO: 6376 - RNA, 20 nt, synthetic construct
  source 1..20: mol_type = other RNA
aaatgaagaggtaaagaata

SEQ ID NO: 6377 - RNA, 20 nt, synthetic construct
  source 1..20: mol_type = other RNA
aaatgatgaattgtcttgat

SEQ ID NO: 6378 - RNA, 20 nt, synthetic construct
  source 1..20: mol_type = other RNA
aaatgttcacaattaagctc

SEQ ID NO: 6379 - RNA, 20 nt, synthetic construct
  source 1..20: mol_type = other RNA
aaattctacttcaacaaaaa

SEQ ID NO: 6380 - RNA, 20 nt, synthetic construct
  source 1..20: mol_type = other RNA
aaattttagccaatggcctc

SEQ ID NO: 6381 - RNA, 20 nt, synthetic construct
  source 1..20: mol_type = other RNA
aaatttttacatcgtctaac

SEQ ID NO: 6382 - RNA, 20 nt, synthetic construct
  source 1..20: mol_type = other RNA
aacaataaaaagaaggagct

SEQ ID NO: 6383 - RNA, 20 nt, synthetic construct
  source 1..20: mol_type = other RNA
aacacccagaagtaacttca

SEQ ID NO: 6384 - RNA, 20 nt, synthetic construct
  source 1..20: mol_type = other RNA
aacatagcaaatcttgattt

SEQ ID NO: 6385 - RNA, 20 nt, synthetic construct
  source 1..20: mol_type = other RNA
aacatatttgatcagtcttt

SEQ ID NO: 6386 - RNA, 20 nt, synthetic construct
  source 1..20: mol_type = other RNA
aacatgaaccctctttattt

SEQ ID NO: 6387 - RNA, 20 nt, synthetic construct
  source 1..20: mol_type = other RNA
aaccagtgaaatcaaagaag

SEQ ID NO: 6388 - RNA, 20 nt, synthetic construct
  source 1..20: mol_type = other RNA
aaccctctttattttctact

SEQ ID NO: 6389 - RNA, 20 nt, synthetic construct
  source 1..20: mol_type = other RNA
aacctgaaactccagaacac

SEQ ID NO: 6390 - RNA, 20 nt, synthetic construct
  source 1..20: mol_type = other RNA
aactaactaacttaattcaa

SEQ ID NO: 6391 - RNA, 20 nt, synthetic construct
  source 1..20: mol_type = other RNA
aactaacttaattcaaaatc

SEQ ID NO: 6392 - RNA, 20 nt, synthetic construct
  source 1..20: mol_type = other RNA
aactacaagtcaaaaatgaa

SEQ ID NO: 6393 - RNA, 20 nt, synthetic construct
  source 1..20: mol_type = other RNA
aactacatataaactacaag

SEQ ID NO: 6394 - RNA, 20 nt, synthetic construct
  source 1..20: mol_type = other RNA
aactagaggaacaataaaaa

SEQ ID NO: 6395 - RNA, 20 nt, synthetic construct
  source 1..20: mol_type = other RNA
aactcaaaacttgaaagcct

SEQ ID NO: 6396 - RNA, 20 nt, synthetic construct
  source 1..20: mol_type = other RNA
aactcaacatatttgatcag

SEQ ID NO: 6397 - RNA, 20 nt, synthetic construct
  source 1..20: mol_type = other RNA
aactcaactcaaaacttgaa

SEQ ID NO: 6398 - RNA, 20 nt, synthetic construct
  source 1..20: mol_type = other RNA
aactccagaacacccagaag

SEQ ID NO: 6399 - RNA, 20 nt, synthetic construct
  source 1..20: mol_type = other RNA
aactgaaggaggccattggc

SEQ ID NO: 6400 - RNA, 20 nt, synthetic construct
  source 1..20: mol_type = other RNA
aactgagaagaactacatat

SEQ ID NO: 6401 - RNA, 20 nt, synthetic construct
  source 1..20: mol_type = other RNA
aacttaattcaaaatcaacc

SEQ ID NO: 6402 - RNA, 20 nt, synthetic construct
  source 1..20: mol_type = other RNA
aacttcacttaaagtaagta

SEQ ID NO: 6403 - RNA, 20 nt, synthetic construct
  source 1..20: mol_type = other RNA
aacttgaaagcctcctagaa

SEQ ID NO: 6404 - RNA, 20 nt, synthetic construct
  source 1..20: mol_type = other RNA
aagaaaaaattctacttcaa

SEQ ID NO: 6405 - RNA, 20 nt, synthetic construct
  source 1..20: mol_type = other RNA
aagaaaaggaactgagaaga

SEQ ID NO: 6406 - RNA, 20 nt, synthetic construct
  source 1..20: mol_type = other RNA
aagaactacatataaactac

SEQ ID NO: 6407 - RNA, 20 nt, synthetic construct
  source 1..20: mol_type = other RNA
aagaagaaaaggaactgaga

SEQ ID NO: 6408 - RNA, 20 nt, synthetic construct
  source 1..20: mol_type = other RNA
aagaagaagaaaaggaactg

SEQ ID NO: 6409 - RNA, 20 nt, synthetic construct
  source 1..20: mol_type = other RNA
aagaatatgtcacttgaact

SEQ ID NO: 6410 - RNA, 20 nt, synthetic construct
  source 1..20: mol_type = other RNA
aagacaattcatcatttgat

SEQ ID NO: 6411 - RNA, 20 nt, synthetic construct
  source 1..20: mol_type = other RNA
aagaccatgtcccaactgaa

SEQ ID NO: 6412 - RNA, 20 nt, synthetic construct
  source 1..20: mol_type = other RNA
aagacgaagggccaaattaa

SEQ ID NO: 6413 - RNA, 20 nt, synthetic construct
  source 1..20: mol_type = other RNA
aagactgatcaaatatgttg

SEQ ID NO: 6414 - RNA, 20 nt, synthetic construct
  source 1..20: mol_type = other RNA
aagactttgtccataagacg

SEQ ID NO: 6415 - RNA, 20 nt, synthetic construct
  source 1..20: mol_type = other RNA
aagagcaactaactaactta

SEQ ID NO: 6416 - RNA, 20 nt, synthetic construct
  source 1..20: mol_type = other RNA
aagaggtaaagaatatgtca

SEQ ID NO: 6417 - RNA, 20 nt, synthetic construct
  source 1..20: mol_type = other RNA
aagatttgctatgttagacg

SEQ ID NO: 6418 - RNA, 20 nt, synthetic construct
  source 1..20: mol_type = other RNA
aagcctcctagaagaaaaaa

SEQ ID NO: 6419 - RNA, 20 nt, synthetic construct
  source 1..20: mol_type = other RNA
aagctccttctttttattgt

SEQ ID NO: 6420 - RNA, 20 nt, synthetic construct
  source 1..20: mol_type = other RNA
aaggaactgagaagaactac

SEQ ID NO: 6421 - RNA, 20 nt, synthetic construct
  source 1..20: mol_type = other RNA
aaggaggccattggctaaaa

SEQ ID NO: 6422 - RNA, 20 nt, synthetic construct
  source 1..20: mol_type = other RNA
aagggccaaattaatgacat

SEQ ID NO: 6423 - RNA, 20 nt, synthetic construct
  source 1..20: mol_type = other RNA
aagtaacttcacttaaagta

SEQ ID NO: 6424 - RNA, 20 nt, synthetic construct
  source 1..20: mol_type = other RNA
aagtaagtagaaaataaaga

SEQ ID NO: 6425 - RNA, 20 nt, synthetic construct
  source 1..20: mol_type = other RNA
aagtagaaaataaagagggt

SEQ ID NO: 6426 - RNA, 20 nt, synthetic construct
  source 1..20: mol_type = other RNA
aagtagaattttttcttcta

SEQ ID NO: 6427 - RNA, 20 nt, synthetic construct
  source 1..20: mol_type = other RNA
aagtcaaaaatgaagaggta

SEQ ID NO: 6428 - RNA, 20 nt, synthetic construct
  source 1..20: mol_type = other RNA
aagtctttaagaccatgtcc

SEQ ID NO: 6429 - RNA, 20 nt, synthetic construct
  source 1..20: mol_type = other RNA
aagtgaaatatttagaagag

SEQ ID NO: 6430 - RNA, 20 nt, synthetic construct
  source 1..20: mol_type = other RNA
aagtgaagttacttctgggt

SEQ ID NO: 6431 - RNA, 20 nt, synthetic construct
  source 1..20: mol_type = other RNA
aagtgacatattctttacct

SEQ ID NO: 6432 - RNA, 20 nt, synthetic construct
  source 1..20: mol_type = other RNA
aagttacttctgggtgttct

SEQ ID NO: 6433 - RNA, 20 nt, synthetic construct
  source 1..20: mol_type = other RNA
aagttagttagttgctcttc

SEQ ID NO: 6434 - RNA, 20 nt, synthetic construct
  source 1..20: mol_type = other RNA
aagttttgagttgagttcaa

SEQ ID NO: 6435 - RNA, 20 nt, synthetic construct
  source 1..20: mol_type = other RNA
aataaaaagaaggagcttaa

SEQ ID NO: 6436 - RNA, 20 nt, synthetic construct
  source 1..20: mol_type = other RNA
aataactagaggaacaataa

SEQ ID NO: 6437 - RNA, 20 nt, synthetic construct
  source 1..20: mol_type = other RNA
aatatgtcacttgaactcaa

SEQ ID NO: 6438 - RNA, 20 nt, synthetic construct
  source 1..20: mol_type = other RNA
aatatgtcattaatttggcc

SEQ ID NO: 6439 - RNA, 20 nt, synthetic construct
  source 1..20: mol_type = other RNA
aatatgttgagtttttgaaa

SEQ ID NO: 6440 - RNA, 20 nt, synthetic construct
  source 1..20: mol_type = other RNA
aatatttagaagagcaacta

SEQ ID NO: 6441 - RNA, 20 nt, synthetic construct
  source 1..20: mol_type = other RNA
aatatttcactttttgttga

SEQ ID NO: 6442 - RNA, 20 nt, synthetic construct
  source 1..20: mol_type = other RNA
aatcaaagaagaagaaaagg

SEQ ID NO: 6443 - RNA, 20 nt, synthetic construct
  source 1..20: mol_type = other RNA
aatcaaatgatgaattgtct

SEQ ID NO: 6444 - RNA, 20 nt, synthetic construct
  source 1..20: mol_type = other RNA
aatcaacctgaaactccaga

SEQ ID NO: 6445 - RNA, 20 nt, synthetic construct
  source 1..20: mol_type = other RNA
aatcaagatttgctatgtta

SEQ ID NO: 6446 - RNA, 20 nt, synthetic construct
  source 1..20: mol_type = other RNA
aatcttgattttggctctgg

SEQ ID NO: 6447 - RNA, 20 nt, synthetic construct
  source 1..20: mol_type = other RNA
aatgaagaggtaaagaatat

SEQ ID NO: 6448 - RNA, 20 nt, synthetic construct
  source 1..20: mol_type = other RNA
aatgacatatttcaaaaact

SEQ ID NO: 6449 - RNA, 20 nt, synthetic construct
  source 1..20: mol_type = other RNA
aatgatgaattgtcttgatc

SEQ ID NO: 6450 - RNA, 20 nt, synthetic construct
  source 1..20: mol_type = other RNA
aatggcctccttcagttggg

SEQ ID NO: 6451 - RNA, 20 nt, synthetic construct
  source 1..20: mol_type = other RNA
aatgttcacaattaagctcc

SEQ ID NO: 6452 - RNA, 20 nt, synthetic construct
  source 1..20: mol_type = other RNA
aattaagctccttcttttta

SEQ ID NO: 6453 - RNA, 20 nt, synthetic construct
  source 1..20: mol_type = other RNA
aattaagttagttagttgct

SEQ ID NO: 6454 - RNA, 20 nt, synthetic construct
  source 1..20: mol_type = other RNA
aattcaaaatcaacctgaaa

SEQ ID NO: 6455 - RNA, 20 nt, synthetic construct
  source 1..20: mol_type = other RNA
aattcatcatttgattctct

SEQ ID NO: 6456 - RNA, 20 nt, synthetic construct
  source 1..20: mol_type = other RNA
aattctacttcaacaaaaag

SEQ ID NO: 6457 - RNA, 20 nt, synthetic construct
  source 1..20: mol_type = other RNA
aattctggaggaaataacta

SEQ ID NO: 6458 - RNA, 20 nt, synthetic construct
  source 1..20: mol_type = other RNA
aattgatcaagacaattcat

SEQ ID NO: 6459 - RNA, 20 nt, synthetic construct
  source 1..20: mol_type = other RNA
aattgtcttgatcaattctg

SEQ ID NO: 6460 - RNA, 20 nt, synthetic construct
  source 1..20: mol_type = other RNA
aatttggcccttcgtcttat

SEQ ID NO: 6461 - RNA, 20 nt, synthetic construct
  source 1..20: mol_type = other RNA
aattttagccaatggcctcc

SEQ ID NO: 6462 - RNA, 20 nt, synthetic construct
  source 1..20: mol_type = other RNA
aatttttacatcgtctaaca

SEQ ID NO: 6463 - RNA, 20 nt, synthetic construct
  source 1..20: mol_type = other RNA
aattttttcttctaggaggc

SEQ ID NO: 6464 - RNA, 20 nt, synthetic construct
  source 1..20: mol_type = other RNA
acaaaaagtgaaatatttag

SEQ ID NO: 6465 - RNA, 20 nt, synthetic construct
  source 1..20: mol_type = other RNA
acaaagtctttaagaccatg

SEQ ID NO: 6466 - RNA, 20 nt, synthetic construct
  source 1..20: mol_type = other RNA
acaagtcaaaaatgaagagg

SEQ ID NO: 6467 - RNA, 20 nt, synthetic construct
  source 1..20: mol_type = other RNA
acaataaaaagaaggagctt

SEQ ID NO: 6468 - RNA, 20 nt, synthetic construct
  source 1..20: mol_type = other RNA
acaattaagctccttctttt

SEQ ID NO: 6469 - RNA, 20 nt, synthetic construct
  source 1..20: mol_type = other RNA
acaattcatcatttgattct

SEQ ID NO: 6470 - RNA, 20 nt, synthetic construct
  source 1..20: mol_type = other RNA
acacccagaagtaacttcac

SEQ ID NO: 6471 - RNA, 20 nt, synthetic construct
  source 1..20: mol_type = other RNA
acatagcaaatcttgatttt

SEQ ID NO: 6472 - RNA, 20 nt, synthetic construct
  source 1..20: mol_type = other RNA
acatataaactacaagtcaa

SEQ ID NO: 6473 - RNA, 20 nt, synthetic construct
  source 1..20: mol_type = other RNA
acatattctttacctcttca

SEQ ID NO: 6474 - RNA, 20 nt, synthetic construct
  source 1..20: mol_type = other RNA
acatatttcaaaaactcaac

SEQ ID NO: 6475 - RNA, 20 nt, synthetic construct
  source 1..20: mol_type = other RNA
acatatttgatcagtctttt

SEQ ID NO: 6476 - RNA, 20 nt, synthetic construct
  source 1..20: mol_type = other RNA
acatcgtctaacatagcaaa

SEQ ID NO: 6477 - RNA, 20 nt, synthetic construct
  source 1..20: mol_type = other RNA
acatgaaccctctttatttt

SEQ ID NO: 6478 - RNA, 20 nt, synthetic construct
  source 1..20: mol_type = other RNA
acatggtcttaaagactttg

SEQ ID NO: 6479 - RNA, 20 nt, synthetic construct
  source 1..20: mol_type = other RNA
accagtgaaatcaaagaaga

SEQ ID NO: 6480 - RNA, 20 nt, synthetic construct
  source 1..20: mol_type = other RNA
accatgtcccaactgaagga

SEQ ID NO: 6481 - RNA, 20 nt, synthetic construct
  source 1..20: mol_type = other RNA
acccagaagtaacttcactt

SEQ ID NO: 6482 - RNA, 20 nt, synthetic construct
  source 1..20: mol_type = other RNA
accctctttattttctactt

SEQ ID NO: 6483 - RNA, 20 nt, synthetic construct
  source 1..20: mol_type = other RNA
acctcttcatttttgacttg

SEQ ID NO: 6484 - RNA, 20 nt, synthetic construct
  source 1..20: mol_type = other RNA
acctgaaactccagaacacc

SEQ ID NO: 6485 - RNA, 20 nt, synthetic construct
  source 1..20: mol_type = other RNA
acgaagggccaaattaatga

SEQ ID NO: 6486 - RNA, 20 nt, synthetic construct
  source 1..20: mol_type = other RNA
acgatgtaaaaattttagcc

SEQ ID NO: 6487 - RNA, 20 nt, synthetic construct
  source 1..20: mol_type = other RNA
actaactaacttaattcaaa

SEQ ID NO: 6488 - RNA, 20 nt, synthetic construct
  source 1..20: mol_type = other RNA
actaacttaattcaaaatca

SEQ ID NO: 6489 - RNA, 20 nt, synthetic construct
  source 1..20: mol_type = other RNA
actacaagtcaaaaatgaag

SEQ ID NO: 6490 - RNA, 20 nt, synthetic construct
  source 1..20: mol_type = other RNA
actacatataaactacaagt

SEQ ID NO: 6491 - RNA, 20 nt, synthetic construct
  source 1..20: mol_type = other RNA
actagaggaacaataaaaag

SEQ ID NO: 6492 - RNA, 20 nt, synthetic construct
  source 1..20: mol_type = other RNA
actcaaaacttgaaagcctc

SEQ ID NO: 6493 - RNA, 20 nt, synthetic construct
  source 1..20: mol_type = other RNA
actcaacatatttgatcagt

SEQ ID NO: 6494 - RNA, 20 nt, synthetic construct
  source 1..20: mol_type = other RNA
actcaactcaaaacttgaaa

SEQ ID NO: 6495 - RNA, 20 nt, synthetic construct
  source 1..20: mol_type = other RNA
actccagaacacccagaagt

SEQ ID NO: 6496 - RNA, 20 nt, synthetic construct
  source 1..20: mol_type = other RNA
actgaaggaggccattggct

SEQ ID NO: 6497 - RNA, 20 nt, synthetic construct
  source 1..20: mol_type = other RNA
actgagaagaactacatata

SEQ ID NO: 6498 - RNA, 20 nt, synthetic construct
  source 1..20: mol_type = other RNA
actgatcaaatatgttgagt

SEQ ID NO: 6499 - RNA, 20 nt, synthetic construct
  source 1..20: mol_type = other RNA
actggtttgcagcgatagat

SEQ ID NO: 6500 - RNA, 20 nt, synthetic construct
  source 1..20: mol_type = other RNA
acttaaagtaagtagaaaat

SEQ ID NO: 6501 - RNA, 20 nt, synthetic construct
  source 1..20: mol_type = other RNA
acttaattcaaaatcaacct

SEQ ID NO: 6502 - RNA, 20 nt, synthetic construct
  source 1..20: mol_type = other RNA
acttactttaagtgaagtta

SEQ ID NO: 6503 - RNA, 20 nt, synthetic construct
  source 1..20: mol_type = other RNA
acttcaacaaaaagtgaaat

SEQ ID NO: 6504 - RNA, 20 nt, synthetic construct
  source 1..20: mol_type = other RNA
acttcacttaaagtaagtag

SEQ ID NO: 6505 - RNA, 20 nt, synthetic construct
  source 1..20: mol_type = other RNA
acttctgggtgttctggagt

SEQ ID NO: 6506 - RNA, 20 nt, synthetic construct
  source 1..20: mol_type = other RNA
acttgaaagcctcctagaag

SEQ ID NO: 6507 - RNA, 20 nt, synthetic construct
  source 1..20: mol_type = other RNA
acttgaactcaactcaaaac

SEQ ID NO: 6508 - RNA, 20 nt, synthetic construct
  source 1..20: mol_type = other RNA
acttgtagtttatatgtagt

SEQ ID NO: 6509 - RNA, 20 nt, synthetic construct
  source 1..20: mol_type = other RNA
actttaagtgaagttacttc

SEQ ID NO: 6510 - RNA, 20 nt, synthetic construct
  source 1..20: mol_type = other RNA
actttgtccataagacgaag

SEQ ID NO: 6511 - RNA, 20 nt, synthetic construct
  source 1..20: mol_type = other RNA
actttttgttgaagtagaat

SEQ ID NO: 6512 - RNA, 20 nt, synthetic construct
  source 1..20: mol_type = other RNA
agaaaaaattctacttcaac

SEQ ID NO: 6513 - RNA, 20 nt, synthetic construct
  source 1..20: mol_type = other RNA
agaaaaggaactgagaagaa

SEQ ID NO: 6514 - RNA, 20 nt, synthetic construct
  source 1..20: mol_type = other RNA
agaacacccagaagtaactt

SEQ ID NO: 6515 - RNA, 20 nt, synthetic construct
  source 1..20: mol_type = other RNA
agaactacatataaactaca

SEQ ID NO: 6516 - RNA, 20 nt, synthetic construct
  source 1..20: mol_type = other RNA
agaagaaaaaattctacttc

SEQ ID NO: 6517 - RNA, 20 nt, synthetic construct
  source 1..20: mol_type = other RNA
agaagaaaaggaactgagaa

SEQ ID NO: 6518 - RNA, 20 nt, synthetic construct
  source 1..20: mol_type = other RNA
agaagaactacatataaact

SEQ ID NO: 6519 - RNA, 20 nt, synthetic construct
  source 1..20: mol_type = other RNA
agaagaagaaaaggaactga

SEQ ID NO: 6520 - RNA, 20 nt, synthetic construct
  source 1..20: mol_type = other RNA
agaagagcaactaactaact

SEQ ID NO: 6521 - RNA, 20 nt, synthetic construct
  source 1..20: mol_type = other RNA
agaagtaacttcacttaaag

SEQ ID NO: 6522 - RNA, 20 nt, synthetic construct
  source 1..20: mol_type = other RNA
agaatatgtcacttgaactc

SEQ ID NO: 6523 - RNA, 20 nt, synthetic construct
  source 1..20: mol_type = other RNA
agaatcaaatgatgaattgt

SEQ ID NO: 6524 - RNA, 20 nt, synthetic construct
  source 1..20: mol_type = other RNA
agaattgatcaagacaattc

SEQ ID NO: 6525 - RNA, 20 nt, synthetic construct
  source 1..20: mol_type = other RNA
agaattttttcttctaggag

SEQ ID NO: 6526 - RNA, 20 nt, synthetic construct
  source 1..20: mol_type = other RNA
agacaattcatcatttgatt

SEQ ID NO: 6527 - RNA, 20 nt, synthetic construct
  source 1..20: mol_type = other RNA
agaccatgtcccaactgaag

SEQ ID NO: 6528 - RNA, 20 nt, synthetic construct
  source 1..20: mol_type = other RNA
agacgaagggccaaattaat

SEQ ID NO: 6529 - RNA, 20 nt, synthetic construct
  source 1..20: mol_type = other RNA
agacgatgtaaaaattttag

SEQ ID NO: 6530 - RNA, 20 nt, synthetic construct
  source 1..20: mol_type = other RNA
agactgatcaaatatgttga

SEQ ID NO: 6531 - RNA, 20 nt, synthetic construct
  source 1..20: mol_type = other RNA
agactttgtccataagacga

SEQ ID NO: 6532 - RNA, 20 nt, synthetic construct
  source 1..20: mol_type = other RNA
agagaatcaaatgatgaatt

SEQ ID NO: 6533 - RNA, 20 nt, synthetic construct
  source 1..20: mol_type = other RNA
agagcaactaactaacttaa

SEQ ID NO: 6534 - RNA, 20 nt, synthetic construct
  source 1..20: mol_type = other RNA
agagccaaaatcaagatttg

SEQ ID NO: 6535 - RNA, 20 nt, synthetic construct
  source 1..20: mol_type = other RNA
agaggaacaataaaaagaag

SEQ ID NO: 6536 - RNA, 20 nt, synthetic construct
  source 1..20: mol_type = other RNA
agaggtaaagaatatgtcac

SEQ ID NO: 6537 - RNA, 20 nt, synthetic construct
  source 1..20: mol_type = other RNA
agatagagaatcaaatgatg

SEQ ID NO: 6538 - RNA, 20 nt, synthetic construct
  source 1..20: mol_type = other RNA
agatcataaaaagactgatc

SEQ ID NO: 6539 - RNA, 20 nt, synthetic construct
  source 1..20: mol_type = other RNA
agatttgctatgttagacga

SEQ ID NO: 6540 - RNA, 20 nt, synthetic construct
  source 1..20: mol_type = other RNA
agcaaatcttgattttggct

SEQ ID NO: 6541 - RNA, 20 nt, synthetic construct
  source 1..20: mol_type = other RNA
agcaactaactaacttaatt

SEQ ID NO: 6542 - RNA, 20 nt, synthetic construct
  source 1..20: mol_type = other RNA
agccaaaatcaagatttgct

SEQ ID NO: 6543 - RNA, 20 nt, synthetic construct
  source 1..20: mol_type = other RNA
agccaatggcctccttcagt

SEQ ID NO: 6544 - RNA, 20 nt, synthetic construct
  source 1..20: mol_type = other RNA
agcctcctagaagaaaaaat

SEQ ID NO: 6545 - RNA, 20 nt, synthetic construct
  source 1..20: mol_type = other RNA
agcgatagatcataaaaaga

SEQ ID NO: 6546 - RNA, 20 nt, synthetic construct
  source 1..20: mol_type = other RNA
agctccttctttttattgtt

SEQ ID NO: 6547 - RNA, 20 nt, synthetic construct
  source 1..20: mol_type = other RNA
aggaaataactagaggaaca

SEQ ID NO: 6548 - RNA, 20 nt, synthetic construct
  source 1..20: mol_type = other RNA
aggaacaataaaaagaagga

SEQ ID NO: 6549 - RNA, 20 nt, synthetic construct
  source 1..20: mol_type = other RNA
aggaactgagaagaactaca

SEQ ID NO: 6550 - RNA, 20 nt, synthetic construct
  source 1..20: mol_type = other RNA
aggaggccattggctaaaat

SEQ ID NO: 6551 - RNA, 20 nt, synthetic construct
  source 1..20: mol_type = other RNA
aggaggctttcaagttttga

SEQ ID NO: 6552 - RNA, 20 nt, synthetic construct
  source 1..20: mol_type = other RNA
aggccattggctaaaatttt

SEQ ID NO: 6553 - RNA, 20 nt, synthetic construct
  source 1..20: mol_type = other RNA
aggctttcaagttttgagtt

SEQ ID NO: 6554 - RNA, 20 nt, synthetic construct
  source 1..20: mol_type = other RNA
agggccaaattaatgacata

SEQ ID NO: 6555 - RNA, 20 nt, synthetic construct
  source 1..20: mol_type = other RNA
aggtaaagaatatgtcactt

SEQ ID NO: 6556 - RNA, 20 nt, synthetic construct
  source 1..20: mol_type = other RNA
aggttgattttgaattaagt

SEQ ID NO: 6557 - RNA, 20 nt, synthetic construct
  source 1..20: mol_type = other RNA
agtaacttcacttaaagtaa

SEQ ID NO: 6558 - RNA, 20 nt, synthetic construct
  source 1..20: mol_type = other RNA
agtaagtagaaaataaagag

SEQ ID NO: 6559 - RNA, 20 nt, synthetic construct
  source 1..20: mol_type = other RNA
agtagaattttttcttctag

SEQ ID NO: 6560 - RNA, 20 nt, synthetic construct
  source 1..20: mol_type = other RNA
agtcaaaaatgaagaggtaa

SEQ ID NO: 6561 - RNA, 20 nt, synthetic construct
  source 1..20: mol_type = other RNA
agtctttaagaccatgtccc

SEQ ID NO: 6562 - RNA, 20 nt, synthetic construct
  source 1..20: mol_type = other RNA
agtctttttatgatctatcg

SEQ ID NO: 6563 - RNA, 20 nt, synthetic construct
  source 1..20: mol_type = other RNA
agtgaaatatttagaagagc

SEQ ID NO: 6564 - RNA, 20 nt, synthetic construct
  source 1..20: mol_type = other RNA
agtgaaatcaaagaagaaga

SEQ ID NO: 6565 - RNA, 20 nt, synthetic construct
  source 1..20: mol_type = other RNA
agtgaagttacttctgggtg

SEQ ID NO: 6566 - RNA, 20 nt, synthetic construct
  source 1..20: mol_type = other RNA
agtgacatattctttacctc

SEQ ID NO: 6567 - RNA, 20 nt, synthetic construct
  source 1..20: mol_type = other RNA
agttacttctgggtgttctg

SEQ ID NO: 6568 - RNA, 20 nt, synthetic construct
  source 1..20: mol_type = other RNA
agttagttagttgctcttct

SEQ ID NO: 6569 - RNA, 20 nt, synthetic construct
  source 1..20: mol_type = other RNA
agttagttgctcttctaaat

SEQ ID NO: 6570 - RNA, 20 nt, synthetic construct
  source 1..20: mol_type = other RNA
agttatttcctccagaattg

SEQ ID NO: 6571 - RNA, 20 nt, synthetic construct
  source 1..20: mol_type = other RNA
agttcaagtgacatattctt

SEQ ID NO: 6572 - RNA, 20 nt, synthetic construct
  source 1..20: mol_type = other RNA
agttccttttcttcttcttt

SEQ ID NO: 6573 - RNA, 20 nt, synthetic construct
  source 1..20: mol_type = other RNA
agttcttctcagttcctttt

SEQ ID NO: 6574 - RNA, 20 nt, synthetic construct
  source 1..20: mol_type = other RNA
agttgagttcaagtgacata

SEQ ID NO: 6575 - RNA, 20 nt, synthetic construct
  source 1..20: mol_type = other RNA
agttgctcttctaaatattt

SEQ ID NO: 6576 - RNA, 20 nt, synthetic construct
  source 1..20: mol_type = other RNA
agttgggacatggtcttaaa

SEQ ID NO: 6577 - RNA, 20 nt, synthetic construct
  source 1..20: mol_type = other RNA
agtttatatgtagttcttct

SEQ ID NO: 6578 - RNA, 20 nt, synthetic construct
  source 1..20: mol_type = other RNA
agtttcaggttgattttgaa

SEQ ID NO: 6579 - RNA, 20 nt, synthetic construct
  source 1..20: mol_type = other RNA
agttttgagttgagttcaag

SEQ ID NO: 6580 - RNA, 20 nt, synthetic construct
  source 1..20: mol_type = other RNA
agtttttgaaatatgtcatt

SEQ ID NO: 6581 - RNA, 20 nt, synthetic construct
  source 1..20: mol_type = other RNA
ataaaaagaaggagcttaat

SEQ ID NO: 6582 - RNA, 20 nt, synthetic construct
  source 1..20: mol_type = other RNA
ataaaaagactgatcaaata

SEQ ID NO: 6583 - RNA, 20 nt, synthetic construct
  source 1..20: mol_type = other RNA
ataaactacaagtcaaaaat

SEQ ID NO: 6584 - RNA, 20 nt, synthetic construct
  source 1..20: mol_type = other RNA
ataactagaggaacaataaa

SEQ ID NO: 6585 - RNA, 20 nt, synthetic construct
  source 1..20: mol_type = other RNA
ataagacgaagggccaaatt

SEQ ID NO: 6586 - RNA, 20 nt, synthetic construct
  source 1..20: mol_type = other RNA
atagagaatcaaatgatgaa

SEQ ID NO: 6587 - RNA, 20 nt, synthetic construct
  source 1..20: mol_type = other RNA
atagatcataaaaagactga

SEQ ID NO: 6588 - RNA, 20 nt, synthetic construct
  source 1..20: mol_type = other RNA
atagcaaatcttgattttgg

SEQ ID NO: 6589 - RNA, 20 nt, synthetic construct
  source 1..20: mol_type = other RNA
atataaactacaagtcaaaa

SEQ ID NO: 6590 - RNA, 20 nt, synthetic construct
  source 1..20: mol_type = other RNA
atatgtagttcttctcagtt

SEQ ID NO: 6591 - RNA, 20 nt, synthetic construct
  source 1..20: mol_type = other RNA
atatgtcacttgaactcaac

SEQ ID NO: 6592 - RNA, 20 nt, synthetic construct
  source 1..20: mol_type = other RNA
atatgtcattaatttggccc

SEQ ID NO: 6593 - RNA, 20 nt, synthetic construct
  source 1..20: mol_type = other RNA
atatgttgagtttttgaaat

SEQ ID NO: 6594 - RNA, 20 nt, synthetic construct
  source 1..20: mol_type = other RNA
atattctttacctcttcatt

SEQ ID NO: 6595 - RNA, 20 nt, synthetic construct
  source 1..20: mol_type = other RNA
atatttagaagagcaactaa

SEQ ID NO: 6596 - RNA, 20 nt, synthetic construct
  source 1..20: mol_type = other RNA
atatttcaaaaactcaacat

SEQ ID NO: 6597 - RNA, 20 nt, synthetic construct
  source 1..20: mol_type = other RNA
atatttcactttttgttgaa

SEQ ID NO: 6598 - RNA, 20 nt, synthetic construct
  source 1..20: mol_type = other RNA
atatttgatcagtcttttta

SEQ ID NO: 6599 - RNA, 20 nt, synthetic construct
  source 1..20: mol_type = other RNA
atcaaagaagaagaaaagga

SEQ ID NO: 6600 - RNA, 20 nt, synthetic construct
  source 1..20: mol_type = other RNA
atcaaatatgttgagttttt

SEQ ID NO: 6601 - RNA, 20 nt, synthetic construct
  source 1..20: mol_type = other RNA
atcaaatgatgaattgtctt

SEQ ID NO: 6602 - RNA, 20 nt, synthetic construct
  source 1..20: mol_type = other RNA
atcaacctgaaactccagaa

SEQ ID NO: 6603 - RNA, 20 nt, synthetic construct
  source 1..20: mol_type = other RNA
atcaagacaattcatcattt

SEQ ID NO: 6604 - RNA, 20 nt, synthetic construct
  source 1..20: mol_type = other RNA
atcaagatttgctatgttag

SEQ ID NO: 6605 - RNA, 20 nt, synthetic construct
  source 1..20: mol_type = other RNA
atcaattctggaggaaataa

SEQ ID NO: 6606 - RNA, 20 nt, synthetic construct
  source 1..20: mol_type = other RNA
atcagtctttttatgatcta

SEQ ID NO: 6607 - RNA, 20 nt, synthetic construct
  source 1..20: mol_type = other RNA
atcataaaaagactgatcaa

SEQ ID NO: 6608 - RNA, 20 nt, synthetic construct
  source 1..20: mol_type = other RNA
atcatttgattctctatctc

SEQ ID NO: 6609 - RNA, 20 nt, synthetic construct
  source 1..20: mol_type = other RNA
atcgctgcaaaccagtgaaa

SEQ ID NO: 6610 - RNA, 20 nt, synthetic construct
  source 1..20: mol_type = other RNA
atcgtctaacatagcaaatc

SEQ ID NO: 6611 - RNA, 20 nt, synthetic construct
  source 1..20: mol_type = other RNA
atctatcgctgcaaaccagt

SEQ ID NO: 6612 - RNA, 20 nt, synthetic construct
  source 1..20: mol_type = other RNA
atctccagagccaaaatcaa

SEQ ID NO: 6613 - RNA, 20 nt, synthetic construct
  source 1..20: mol_type = other RNA
atcttgattttggctctgga

SEQ ID NO: 6614 - RNA, 20 nt, synthetic construct
  source 1..20: mol_type = other RNA
atgaaccctctttattttct

SEQ ID NO: 6615 - RNA, 20 nt, synthetic construct
  source 1..20: mol_type = other RNA
atgaagaggtaaagaatatg

SEQ ID NO: 6616 - RNA, 20 nt, synthetic construct
  source 1..20: mol_type = other RNA
atgaattgtcttgatcaatt

SEQ ID NO: 6617 - RNA, 20 nt, synthetic construct
  source 1..20: mol_type = other RNA
atgacatatttcaaaaactc

SEQ ID NO: 6618 - RNA, 20 nt, synthetic construct
  source 1..20: mol_type = other RNA
atgatctatcgctgcaaacc

SEQ ID NO: 6619 - RNA, 20 nt, synthetic construct
  source 1..20: mol_type = other RNA
atgatgaattgtcttgatca

SEQ ID NO: 6620 - RNA, 20 nt, synthetic construct
  source 1..20: mol_type = other RNA
atggacaaagtctttaagac

SEQ ID NO: 6621 - RNA, 20 nt, synthetic construct
  source 1..20: mol_type = other RNA
atggcctccttcagttggga

SEQ ID NO: 6622 - RNA, 20 nt, synthetic construct
  source 1..20: mol_type = other RNA
atggtcttaaagactttgtc

SEQ ID NO: 6623 - RNA, 20 nt, synthetic construct
  source 1..20: mol_type = other RNA
atgtaaaaattttagccaat

SEQ ID NO: 6624 - RNA, 20 nt, synthetic construct
  source 1..20: mol_type = other RNA
atgtagttcttctcagttcc

SEQ ID NO: 6625 - RNA, 20 nt, synthetic construct
  source 1..20: mol_type = other RNA
atgtcacttgaactcaactc

SEQ ID NO: 6626 - RNA, 20 nt, synthetic construct
  source 1..20: mol_type = other RNA
atgtcattaatttggccctt

SEQ ID NO: 6627 - RNA, 20 nt, synthetic construct
  source 1..20: mol_type = other RNA
atgtcccaactgaaggaggc

SEQ ID NO: 6628 - RNA, 20 nt, synthetic construct
  source 1..20: mol_type = other RNA
atgttagacgatgtaaaaat

SEQ ID NO: 6629 - RNA, 20 nt, synthetic construct
  source 1..20: mol_type = other RNA
atgttcacaattaagctcct

SEQ ID NO: 6630 - RNA, 20 nt, synthetic construct
  source 1..20: mol_type = other RNA
atgttgagtttttgaaatat

SEQ ID NO: 6631 - RNA, 20 nt, synthetic construct
  source 1..20: mol_type = other RNA
attaagctccttctttttat

SEQ ID NO: 6632 - RNA, 20 nt, synthetic construct
  source 1..20: mol_type = other RNA
attaagttagttagttgctc

SEQ ID NO: 6633 - RNA, 20 nt, synthetic construct
  source 1..20: mol_type = other RNA
attaatttggcccttcgtct

SEQ ID NO: 6634 - RNA, 20 nt, synthetic construct
  source 1..20: mol_type = other RNA
attcaaaatcaacctgaaac

SEQ ID NO: 6635 - RNA, 20 nt, synthetic construct
  source 1..20: mol_type = other RNA
attcatcatttgattctcta

SEQ ID NO: 6636 - RNA, 20 nt, synthetic construct
  source 1..20: mol_type = other RNA
attctacttcaacaaaaagt

SEQ ID NO: 6637 - RNA, 20 nt, synthetic construct
  source 1..20: mol_type = other RNA
attctctatctccagagcca

SEQ ID NO: 6638 - RNA, 20 nt, synthetic construct
  source 1..20: mol_type = other RNA
attctggaggaaataactag

SEQ ID NO: 6639 - RNA, 20 nt, synthetic construct
  source 1..20: mol_type = other RNA
attctttacctcttcatttt

SEQ ID NO: 6640 - RNA, 20 nt, synthetic construct
  source 1..20: mol_type = other RNA
attgatcaagacaattcatc

SEQ ID NO: 6641 - RNA, 20 nt, synthetic construct
  source 1..20: mol_type = other RNA
attggctaaaatttttacat

SEQ ID NO: 6642 - RNA, 20 nt, synthetic construct
  source 1..20: mol_type = other RNA
attgtcttgatcaattctgg

SEQ ID NO: 6643 - RNA, 20 nt, synthetic construct
  source 1..20: mol_type = other RNA
attgttcctctagttatttc

SEQ ID NO: 6644 - RNA, 20 nt, synthetic construct
  source 1..20: mol_type = other RNA
atttagaagagcaactaact

SEQ ID NO: 6645 - RNA, 20 nt, synthetic construct
  source 1..20: mol_type = other RNA
atttcaaaaactcaacatat

SEQ ID NO: 6646 - RNA, 20 nt, synthetic construct
  source 1..20: mol_type = other RNA
atttcactggtttgcagcga

SEQ ID NO: 6647 - RNA, 20 nt, synthetic construct
  source 1..20: mol_type = other RNA
atttcactttttgttgaagt

SEQ ID NO: 6648 - RNA, 20 nt, synthetic construct
  source 1..20: mol_type = other RNA
atttcctccagaattgatca

SEQ ID NO: 6649 - RNA, 20 nt, synthetic construct
  source 1..20: mol_type = other RNA
atttgatcagtctttttatg

SEQ ID NO: 6650 - RNA, 20 nt, synthetic construct
  source 1..20: mol_type = other RNA
atttgattctctatctccag

SEQ ID NO: 6651 - RNA, 20 nt, synthetic construct
  source 1..20: mol_type = other RNA
atttgctatgttagacgatg

SEQ ID NO: 6652 - RNA, 20 nt, synthetic construct
  source 1..20: mol_type = other RNA
atttggcccttcgtcttatg

SEQ ID NO: 6653 - RNA, 20 nt, synthetic construct
  source 1..20: mol_type = other RNA
attttagccaatggcctcct

SEQ ID NO: 6654 - RNA, 20 nt, synthetic construct
  source 1..20: mol_type = other RNA
attttctacttactttaagt

SEQ ID NO: 6655 - RNA, 20 nt, synthetic construct
  source 1..20: mol_type = other RNA
attttggctctggagataga

SEQ ID NO: 6656 - RNA, 20 nt, synthetic construct
  source 1..20: mol_type = other RNA
atttttacatcgtctaacat

SEQ ID NO: 6657 - RNA, 20 nt, synthetic construct
  source 1..20: mol_type = other RNA
atttttgacttgtagtttat

SEQ ID NO: 6658 - RNA, 20 nt, synthetic construct
  source 1..20: mol_type = other RNA
attttttcttctaggaggct

SEQ ID NO: 6659 - RNA, 20 nt, synthetic construct
  source 1..20: mol_type = other RNA
caaaaactcaacatatttga

SEQ ID NO: 6660 - RNA, 20 nt, synthetic construct
  source 1..20: mol_type = other RNA
caaaaagtgaaatatttaga

SEQ ID NO: 6661 - RNA, 20 nt, synthetic construct
  source 1..20: mol_type = other RNA
caaaaatgaagaggtaaaga

SEQ ID NO: 6662 - RNA, 20 nt, synthetic construct
  source 1..20: mol_type = other RNA
caaaacttgaaagcctccta

SEQ ID NO: 6663 - RNA, 20 nt, synthetic construct
  source 1..20: mol_type = other RNA
caaaatcaacctgaaactcc

SEQ ID NO: 6664 - RNA, 20 nt, synthetic construct
  source 1..20: mol_type = other RNA
caaaatcaagatttgctatg

SEQ ID NO: 6665 - RNA, 20 nt, synthetic construct
  source 1..20: mol_type = other RNA
caaaccagtgaaatcaaaga

SEQ ID NO: 6666 - RNA, 20 nt, synthetic construct
  source 1..20: mol_type = other RNA
caaagaagaagaaaaggaac

SEQ ID NO: 6667 - RNA, 20 nt, synthetic construct
  source 1..20: mol_type = other RNA
caaagtctttaagaccatgt

SEQ ID NO: 6668 - RNA, 20 nt, synthetic construct
  source 1..20: mol_type = other RNA
caaatatgttgagtttttga

SEQ ID NO: 6669 - RNA, 20 nt, synthetic construct
  source 1..20: mol_type = other RNA
caaatcttgattttggctct

SEQ ID NO: 6670 - RNA, 20 nt, synthetic construct
  source 1..20: mol_type = other RNA
caaatgatgaattgtcttga

SEQ ID NO: 6671 - RNA, 20 nt, synthetic construct
  source 1..20: mol_type = other RNA
caaattaatgacatatttca

SEQ ID NO: 6672 - RNA, 20 nt, synthetic construct
  source 1..20: mol_type = other RNA
caacaaaaagtgaaatattt

SEQ ID NO: 6673 - RNA, 20 nt, synthetic construct
  source 1..20: mol_type = other RNA
caacatatttgatcagtctt

SEQ ID NO: 6674 - RNA, 20 nt, synthetic construct
  source 1..20: mol_type = other RNA
caacctgaaactccagaaca

SEQ ID NO: 6675 - RNA, 20 nt, synthetic construct
  source 1..20: mol_type = other RNA
caactaactaacttaattca

SEQ ID NO: 6676 - RNA, 20 nt, synthetic construct
  source 1..20: mol_type = other RNA
caactcaaaacttgaaagcc

SEQ ID NO: 6677 - RNA, 20 nt, synthetic construct
  source 1..20: mol_type = other RNA
caactgaaggaggccattgg

SEQ ID NO: 6678 - RNA, 20 nt, synthetic construct
  source 1..20: mol_type = other RNA
caagacaattcatcatttga

SEQ ID NO: 6679 - RNA, 20 nt, synthetic construct
  source 1..20: mol_type = other RNA
caagatttgctatgttagac

SEQ ID NO: 6680 - RNA, 20 nt, synthetic construct
  source 1..20: mol_type = other RNA
caagtcaaaaatgaagaggt

SEQ ID NO: 6681 - RNA, 20 nt, synthetic construct
  source 1..20: mol_type = other RNA
caagtgacatattctttacc

SEQ ID NO: 6682 - RNA, 20 nt, synthetic construct
  source 1..20: mol_type = other RNA
caagttttgagttgagttca

SEQ ID NO: 6683 - RNA, 20 nt, synthetic construct
  source 1..20: mol_type = other RNA
caataaaaagaaggagctta

SEQ ID NO: 6684 - RNA, 20 nt, synthetic construct
  source 1..20: mol_type = other RNA
caatggcctccttcagttgg

SEQ ID NO: 6685 - RNA, 20 nt, synthetic construct
  source 1..20: mol_type = other RNA
caattaagctccttcttttt

SEQ ID NO: 6686 - RNA, 20 nt, synthetic construct
  source 1..20: mol_type = other RNA
caattcatcatttgattctc

SEQ ID NO: 6687 - RNA, 20 nt, synthetic construct
  source 1..20: mol_type = other RNA
caattctggaggaaataact

SEQ ID NO: 6688 - RNA, 20 nt, synthetic construct
  source 1..20: mol_type = other RNA
cacaattaagctccttcttt

SEQ ID NO: 6689 - RNA, 20 nt, synthetic construct
  source 1..20: mol_type = other RNA
cacccagaagtaacttcact

SEQ ID NO: 6690 - RNA, 20 nt, synthetic construct
  source 1..20: mol_type = other RNA
cactggtttgcagcgataga

SEQ ID NO: 6691 - RNA, 20 nt, synthetic construct
  source 1..20: mol_type = other RNA
cacttaaagtaagtagaaaa

SEQ ID NO: 6692 - RNA, 20 nt, synthetic construct
  source 1..20: mol_type = other RNA
cacttgaactcaactcaaaa

SEQ ID NO: 6693 - RNA, 20 nt, synthetic construct
  source 1..20: mol_type = other RNA
cactttttgttgaagtagaa

SEQ ID NO: 6694 - RNA, 20 nt, synthetic construct
  source 1..20: mol_type = other RNA
cagaacacccagaagtaact

SEQ ID NO: 6695 - RNA, 20 nt, synthetic construct
  source 1..20: mol_type = other RNA
cagaagtaacttcacttaaa

SEQ ID NO: 6696 - RNA, 20 nt, synthetic construct
  source 1..20: mol_type = other RNA
cagaattgatcaagacaatt

SEQ ID NO: 6697 - RNA, 20 nt, synthetic construct
  source 1..20: mol_type = other RNA
cagagccaaaatcaagattt

SEQ ID NO: 6698 - RNA, 20 nt, synthetic construct
  source 1..20: mol_type = other RNA
cagcgatagatcataaaaag

SEQ ID NO: 6699 - RNA, 20 nt, synthetic construct
  source 1..20: mol_type = other RNA
caggttgattttgaattaag

SEQ ID NO: 6700 - RNA, 20 nt, synthetic construct
  source 1..20: mol_type = other RNA
cagtctttttatgatctatc

SEQ ID NO: 6701 - RNA, 20 nt, synthetic construct
  source 1..20: mol_type = other RNA
cagtgaaatcaaagaagaag

SEQ ID NO: 6702 - RNA, 20 nt, synthetic construct
  source 1..20: mol_type = other RNA
cagttccttttcttcttctt

SEQ ID NO: 6703 - RNA, 20 nt, synthetic construct
  source 1..20: mol_type = other RNA
cagttgggacatggtcttaa

SEQ ID NO: 6704 - RNA, 20 nt, synthetic construct
  source 1..20: mol_type = other RNA
cataaaaagactgatcaaat

SEQ ID NO: 6705 - RNA, 20 nt, synthetic construct
  source 1..20: mol_type = other RNA
cataagacgaagggccaaat

SEQ ID NO: 6706 - RNA, 20 nt, synthetic construct
  source 1..20: mol_type = other RNA
catagcaaatcttgattttg

SEQ ID NO: 6707 - RNA, 20 nt, synthetic construct
  source 1..20: mol_type = other RNA
catataaactacaagtcaaa

SEQ ID NO: 6708 - RNA, 20 nt, synthetic construct
  source 1..20: mol_type = other RNA
catattctttacctcttcat

SEQ ID NO: 6709 - RNA, 20 nt, synthetic construct
  source 1..20: mol_type = other RNA
catatttcaaaaactcaaca

SEQ ID NO: 6710 - RNA, 20 nt, synthetic construct
  source 1..20: mol_type = other RNA
catatttgatcagtcttttt

SEQ ID NO: 6711 - RNA, 20 nt, synthetic construct
  source 1..20: mol_type = other RNA
catcatttgattctctatct

SEQ ID NO: 6712 - RNA, 20 nt, synthetic construct
  source 1..20: mol_type = other RNA
catcgtctaacatagcaaat

SEQ ID NO: 6713 - RNA, 20 nt, synthetic construct
  source 1..20: mol_type = other RNA
catgaaccctctttattttc

SEQ ID NO: 6714 - RNA, 20 nt, synthetic construct
  source 1..20: mol_type = other RNA
catggtcttaaagactttgt

SEQ ID NO: 6715 - RNA, 20 nt, synthetic construct
  source 1..20: mol_type = other RNA
catgtcccaactgaaggagg

SEQ ID NO: 6716 - RNA, 20 nt, synthetic construct
  source 1..20: mol_type = other RNA
cattaatttggcccttcgtc

SEQ ID NO: 6717 - RNA, 20 nt, synthetic construct
  source 1..20: mol_type = other RNA
cattggctaaaatttttaca

SEQ ID NO: 6718 - RNA, 20 nt, synthetic construct
  source 1..20: mol_type = other RNA
catttgattctctatctcca

SEQ ID NO: 6719 - RNA, 20 nt, synthetic construct
  source 1..20: mol_type = other RNA
catttttgacttgtagttta

SEQ ID NO: 6720 - RNA, 20 nt, synthetic construct
  source 1..20: mol_type = other RNA
ccaaaatcaagatttgctat

SEQ ID NO: 6721 - RNA, 20 nt, synthetic construct
  source 1..20: mol_type = other RNA
ccaaattaatgacatatttc

SEQ ID NO: 6722 - RNA, 20 nt, synthetic construct
  source 1..20: mol_type = other RNA
ccaactgaaggaggccattg

SEQ ID NO: 6723 - RNA, 20 nt, synthetic construct
  source 1..20: mol_type = other RNA
ccaatggcctccttcagttg

SEQ ID NO: 6724 - RNA, 20 nt, synthetic construct
  source 1..20: mol_type = other RNA
ccagaacacccagaagtaac

SEQ ID NO: 6725 - RNA, 20 nt, synthetic construct
  source 1..20: mol_type = other RNA
ccagaagtaacttcacttaa

SEQ ID NO: 6726 - RNA, 20 nt, synthetic construct
  source 1..20: mol_type = other RNA
ccagaattgatcaagacaat

SEQ ID NO: 6727 - RNA, 20 nt, synthetic construct
  source 1..20: mol_type = other RNA
ccagagccaaaatcaagatt

SEQ ID NO: 6728 - RNA, 20 nt, synthetic construct
  source 1..20: mol_type = other RNA
ccagtgaaatcaaagaagaa

SEQ ID NO: 6729 - RNA, 20 nt, synthetic construct
  source 1..20: mol_type = other RNA
ccataagacgaagggccaaa

SEQ ID NO: 6730 - RNA, 20 nt, synthetic construct
  source 1..20: mol_type = other RNA
ccatgtcccaactgaaggag

SEQ ID NO: 6731 - RNA, 20 nt, synthetic construct
  source 1..20: mol_type = other RNA
ccattggctaaaatttttac

SEQ ID NO: 6732 - RNA, 20 nt, synthetic construct
  source 1..20: mol_type = other RNA
cccaactgaaggaggccatt

SEQ ID NO: 6733 - RNA, 20 nt, synthetic construct
  source 1..20: mol_type = other RNA
cccagaagtaacttcactta

SEQ ID NO: 6734 - RNA, 20 nt, synthetic construct
  source 1..20: mol_type = other RNA
ccctctttattttctactta

SEQ ID NO: 6735 - RNA, 20 nt, synthetic construct
  source 1..20: mol_type = other RNA
cccttcgtcttatggacaaa

SEQ ID NO: 6736 - RNA, 20 nt, synthetic construct
  source 1..20: mol_type = other RNA
cctagaagaaaaaattctac

SEQ ID NO: 6737 - RNA, 20 nt, synthetic construct
  source 1..20: mol_type = other RNA
cctccagaattgatcaagac

SEQ ID NO: 6738 - RNA, 20 nt, synthetic construct
  source 1..20: mol_type = other RNA
cctcctagaagaaaaaattc

SEQ ID NO: 6739 - RNA, 20 nt, synthetic construct
  source 1..20: mol_type = other RNA
cctccttcagttgggacatg

SEQ ID NO: 6740 - RNA, 20 nt, synthetic construct
  source 1..20: mol_type = other RNA
cctctagttatttcctccag

SEQ ID NO: 6741 - RNA, 20 nt, synthetic construct
  source 1..20: mol_type = other RNA
cctcttcatttttgacttgt

SEQ ID NO: 6742 - RNA, 20 nt, synthetic construct
  source 1..20: mol_type = other RNA
cctctttattttctacttac

SEQ ID NO: 6743 - RNA, 20 nt, synthetic construct
  source 1..20: mol_type = other RNA
cctgaaactccagaacaccc

SEQ ID NO: 6744 - RNA, 20 nt, synthetic construct
  source 1..20: mol_type = other RNA
ccttcagttgggacatggtc

SEQ ID NO: 6745 - RNA, 20 nt, synthetic construct
  source 1..20: mol_type = other RNA
ccttcgtcttatggacaaag

SEQ ID NO: 6746 - RNA, 20 nt, synthetic construct
  source 1..20: mol_type = other RNA
ccttctttttattgttcctc

SEQ ID NO: 6747 - RNA, 20 nt, synthetic construct
  source 1..20: mol_type = other RNA
ccttttcttcttctttgatt

SEQ ID NO: 6748 - RNA, 20 nt, synthetic construct
  source 1..20: mol_type = other RNA
cgaagggccaaattaatgac

SEQ ID NO: 6749 - RNA, 20 nt, synthetic construct
  source 1..20: mol_type = other RNA
cgatagatcataaaaagact

SEQ ID NO: 6750 - RNA, 20 nt, synthetic construct
  source 1..20: mol_type = other RNA
cgatgtaaaaattttagcca

SEQ ID NO: 6751 - RNA, 20 nt, synthetic construct
  source 1..20: mol_type = other RNA
cgctgcaaaccagtgaaatc

SEQ ID NO: 6752 - RNA, 20 nt, synthetic construct
  source 1..20: mol_type = other RNA
cgtctaacatagcaaatctt

SEQ ID NO: 6753 - RNA, 20 nt, synthetic construct
  source 1..20: mol_type = other RNA
cgtcttatggacaaagtctt

SEQ ID NO: 6754 - RNA, 20 nt, synthetic construct
  source 1..20: mol_type = other RNA
ctaaaatttttacatcgtct

SEQ ID NO: 6755 - RNA, 20 nt, synthetic construct
  source 1..20: mol_type = other RNA
ctaaatatttcactttttgt

SEQ ID NO: 6756 - RNA, 20 nt, synthetic construct
  source 1..20: mol_type = other RNA
ctaacatagcaaatcttgat

SEQ ID NO: 6757 - RNA, 20 nt, synthetic construct
  source 1..20: mol_type = other RNA
ctaactaacttaattcaaaa

SEQ ID NO: 6758 - RNA, 20 nt, synthetic construct
  source 1..20: mol_type = other RNA
ctaacttaattcaaaatcaa

SEQ ID NO: 6759 - RNA, 20 nt, synthetic construct
  source 1..20: mol_type = other RNA
ctacaagtcaaaaatgaaga

SEQ ID NO: 6760 - RNA, 20 nt, synthetic construct
  source 1..20: mol_type = other RNA
ctacatataaactacaagtc

SEQ ID NO: 6761 - RNA, 20 nt, synthetic construct
  source 1..20: mol_type = other RNA
ctacttactttaagtgaagt

SEQ ID NO: 6762 - RNA, 20 nt, synthetic construct
  source 1..20: mol_type = other RNA
ctacttcaacaaaaagtgaa

SEQ ID NO: 6763 - RNA, 20 nt, synthetic construct
  source 1..20: mol_type = other RNA
ctagaagaaaaaattctact

SEQ ID NO: 6764 - RNA, 20 nt, synthetic construct
  source 1..20: mol_type = other RNA
ctagaggaacaataaaaaga

SEQ ID NO: 6765 - RNA, 20 nt, synthetic construct
  source 1..20: mol_type = other RNA
ctaggaggctttcaagtttt

SEQ ID NO: 6766 - RNA, 20 nt, synthetic construct
  source 1..20: mol_type = other RNA
ctagttatttcctccagaat

SEQ ID NO: 6767 - RNA, 20 nt, synthetic construct
  source 1..20: mol_type = other RNA
ctatcgctgcaaaccagtga

SEQ ID NO: 6768 - RNA, 20 nt, synthetic construct
  source 1..20: mol_type = other RNA
ctatctccagagccaaaatc

SEQ ID NO: 6769 - RNA, 20 nt, synthetic construct
  source 1..20: mol_type = other RNA
ctatgttagacgatgtaaaa

SEQ ID NO: 6770 - RNA, 20 nt, synthetic construct
  source 1..20: mol_type = other RNA
ctcaaaacttgaaagcctcc

SEQ ID NO: 6771 - RNA, 20 nt, synthetic construct
  source 1..20: mol_type = other RNA
ctcaacatatttgatcagtc

SEQ ID NO: 6772 - RNA, 20 nt, synthetic construct
  source 1..20: mol_type = other RNA
ctcaactcaaaacttgaaag

SEQ ID NO: 6773 - RNA, 20 nt, synthetic construct
  source 1..20: mol_type = other RNA
ctcagttccttttcttcttc

SEQ ID NO: 6774 - RNA, 20 nt, synthetic construct
  source 1..20: mol_type = other RNA
ctccagaacacccagaagta

SEQ ID NO: 6775 - RNA, 20 nt, synthetic construct
  source 1..20: mol_type = other RNA
ctccagaattgatcaagaca

SEQ ID NO: 6776 - RNA, 20 nt, synthetic construct
  source 1..20: mol_type = other RNA
ctccagagccaaaatcaaga

SEQ ID NO: 6777 - RNA, 20 nt, synthetic construct
  source 1..20: mol_type = other RNA
ctcctagaagaaaaaattct

SEQ ID NO: 6778 - RNA, 20 nt, synthetic construct
  source 1..20: mol_type = other RNA
ctccttcagttgggacatgg

SEQ ID NO: 6779 - RNA, 20 nt, synthetic construct
  source 1..20: mol_type = other RNA
ctccttctttttattgttcc

SEQ ID NO: 6780 - RNA, 20 nt, synthetic construct
  source 1..20: mol_type = other RNA
ctctagttatttcctccaga

SEQ ID NO: 6781 - RNA, 20 nt, synthetic construct
  source 1..20: mol_type = other RNA
ctctatctccagagccaaaa

SEQ ID NO: 6782 - RNA, 20 nt, synthetic construct
  source 1..20: mol_type = other RNA
ctctggagatagagaatcaa

SEQ ID NO: 6783 - RNA, 20 nt, synthetic construct
  source 1..20: mol_type = other RNA
ctcttcatttttgacttgta

SEQ ID NO: 6784 - RNA, 20 nt, synthetic construct
  source 1..20: mol_type = other RNA
ctcttctaaatatttcactt

SEQ ID NO: 6785 - RNA, 20 nt, synthetic construct
  source 1..20: mol_type = other RNA
ctctttattttctacttact

SEQ ID NO: 6786 - RNA, 20 nt, synthetic construct
  source 1..20: mol_type = other RNA
ctgaaactccagaacaccca

SEQ ID NO: 6787 - RNA, 20 nt, synthetic construct
  source 1..20: mol_type = other RNA
ctgaaggaggccattggcta

SEQ ID NO: 6788 - RNA, 20 nt, synthetic construct
  source 1..20: mol_type = other RNA
ctgagaagaactacatataa

SEQ ID NO: 6789 - RNA, 20 nt, synthetic construct
  source 1..20: mol_type = other RNA
ctgatcaaatatgttgagtt

SEQ ID NO: 6790 - RNA, 20 nt, synthetic construct
  source 1..20: mol_type = other RNA
ctgcaaaccagtgaaatcaa

SEQ ID NO: 6791 - RNA, 20 nt, synthetic construct
  source 1..20: mol_type = other RNA
ctggagatagagaatcaaat

SEQ ID NO: 6792 - RNA, 20 nt, synthetic construct
  source 1..20: mol_type = other RNA
ctggaggaaataactagagg

SEQ ID NO: 6793 - RNA, 20 nt, synthetic construct
  source 1..20: mol_type = other RNA
ctggagtttcaggttgattt

SEQ ID NO: 6794 - RNA, 20 nt, synthetic construct
  source 1..20: mol_type = other RNA
ctgggtgttctggagtttca

SEQ ID NO: 6795 - RNA, 20 nt, synthetic construct
  source 1..20: mol_type = other RNA
ctggtttgcagcgatagatc

SEQ ID NO: 6796 - RNA, 20 nt, synthetic construct
  source 1..20: mol_type = other RNA
cttaaagactttgtccataa

SEQ ID NO: 6797 - RNA, 20 nt, synthetic construct
  source 1..20: mol_type = other RNA
cttaaagtaagtagaaaata

SEQ ID NO: 6798 - RNA, 20 nt, synthetic construct
  source 1..20: mol_type = other RNA
cttaattcaaaatcaacctg

SEQ ID NO: 6799 - RNA, 20 nt, synthetic construct
  source 1..20: mol_type = other RNA
cttactttaagtgaagttac

SEQ ID NO: 6800 - RNA, 20 nt, synthetic construct
  source 1..20: mol_type = other RNA
cttatggacaaagtctttaa

SEQ ID NO: 6801 - RNA, 20 nt, synthetic construct
  source 1..20: mol_type = other RNA
cttcaacaaaaagtgaaata

SEQ ID NO: 6802 - RNA, 20 nt, synthetic construct
  source 1..20: mol_type = other RNA
cttcacttaaagtaagtaga

SEQ ID NO: 6803 - RNA, 20 nt, synthetic construct
  source 1..20: mol_type = other RNA
cttcagttgggacatggtct

SEQ ID NO: 6804 - RNA, 20 nt, synthetic construct
  source 1..20: mol_type = other RNA
cttcatttttgacttgtagt

SEQ ID NO: 6805 - RNA, 20 nt, synthetic construct
  source 1..20: mol_type = other RNA
cttcgtcttatggacaaagt

SEQ ID NO: 6806 - RNA, 20 nt, synthetic construct
  source 1..20: mol_type = other RNA
cttctaaatatttcactttt

SEQ ID NO: 6807 - RNA, 20 nt, synthetic construct
  source 1..20: mol_type = other RNA
cttctaggaggctttcaagt

SEQ ID NO: 6808 - RNA, 20 nt, synthetic construct
  source 1..20: mol_type = other RNA
cttctcagttccttttcttc

SEQ ID NO: 6809 - RNA, 20 nt, synthetic construct
  source 1..20: mol_type = other RNA
cttctgggtgttctggagtt

SEQ ID NO: 6810 - RNA, 20 nt, synthetic construct
  source 1..20: mol_type = other RNA
cttcttctttgatttcactg

SEQ ID NO: 6811 - RNA, 20 nt, synthetic construct
  source 1..20: mol_type = other RNA
cttctttgatttcactggtt

SEQ ID NO: 6812 - RNA, 20 nt, synthetic construct
  source 1..20: mol_type = other RNA
cttctttttattgttcctct

SEQ ID NO: 6813 - RNA, 20 nt, synthetic construct
  source 1..20: mol_type = other RNA
cttgaaagcctcctagaaga

SEQ ID NO: 6814 - RNA, 20 nt, synthetic construct
  source 1..20: mol_type = other RNA
cttgaactcaactcaaaact

SEQ ID NO: 6815 - RNA, 20 nt, synthetic construct
  source 1..20: mol_type = other RNA
cttgatcaattctggaggaa

SEQ ID NO: 6816 - RNA, 20 nt, synthetic construct
  source 1..20: mol_type = other RNA
cttgattttggctctggaga

SEQ ID NO: 6817 - RNA, 20 nt, synthetic construct
  source 1..20: mol_type = other RNA
cttgtagtttatatgtagtt

SEQ ID NO: 6818 - RNA, 20 nt, synthetic construct
  source 1..20: mol_type = other RNA
ctttaagaccatgtcccaac

SEQ ID NO: 6819 - RNA, 20 nt, synthetic construct
  source 1..20: mol_type = other RNA
ctttaagtgaagttacttct

SEQ ID NO: 6820 - RNA, 20 nt, synthetic construct
  source 1..20: mol_type = other RNA
ctttacctcttcatttttga

SEQ ID NO: 6821 - RNA, 20 nt, synthetic construct
  source 1..20: mol_type = other RNA
ctttattttctacttacttt

SEQ ID NO: 6822 - RNA, 20 nt, synthetic construct
  source 1..20: mol_type = other RNA
ctttcaagttttgagttgag

SEQ ID NO: 6823 - RNA, 20 nt, synthetic construct
  source 1..20: mol_type = other RNA
ctttgatttcactggtttgc

SEQ ID NO: 6824 - RNA, 20 nt, synthetic construct
  source 1..20: mol_type = other RNA
ctttgtccataagacgaagg

SEQ ID NO: 6825 - RNA, 20 nt, synthetic construct
  source 1..20: mol_type = other RNA
cttttcttcttctttgattt

SEQ ID NO: 6826 - RNA, 20 nt, synthetic construct
  source 1..20: mol_type = other RNA
ctttttatgatctatcgctg

SEQ ID NO: 6827 - RNA, 20 nt, synthetic construct
  source 1..20: mol_type = other RNA
ctttttattgttcctctagt

SEQ ID NO: 6828 - RNA, 20 nt, synthetic construct
  source 1..20: mol_type = other RNA
ctttttgttgaagtagaatt

SEQ ID NO: 6829 - RNA, 20 nt, synthetic construct
  source 1..20: mol_type = other RNA
gaaaaaattctacttcaaca

SEQ ID NO: 6830 - RNA, 20 nt, synthetic construct
  source 1..20: mol_type = other RNA
gaaaaggaactgagaagaac

SEQ ID NO: 6831 - RNA, 20 nt, synthetic construct
  source 1..20: mol_type = other RNA
gaaactccagaacacccaga

SEQ ID NO: 6832 - RNA, 20 nt, synthetic construct
  source 1..20: mol_type = other RNA
gaaagcctcctagaagaaaa

SEQ ID NO: 6833 - RNA, 20 nt, synthetic construct
  source 1..20: mol_type = other RNA
gaaataactagaggaacaat

SEQ ID NO: 6834 - RNA, 20 nt, synthetic construct
  source 1..20: mol_type = other RNA
gaaatatgtcattaatttgg

SEQ ID NO: 6835 - RNA, 20 nt, synthetic construct
  source 1..20: mol_type = other RNA
gaaatatttagaagagcaac

SEQ ID NO: 6836 - RNA, 20 nt, synthetic construct
  source 1..20: mol_type = other RNA
gaaatcaaagaagaagaaaa

SEQ ID NO: 6837 - RNA, 20 nt, synthetic construct
  source 1..20: mol_type = other RNA
gaacaataaaaagaaggagc

SEQ ID NO: 6838 - RNA, 20 nt, synthetic construct
  source 1..20: mol_type = other RNA
gaacacccagaagtaacttc

SEQ ID NO: 6839 - RNA, 20 nt, synthetic construct
  source 1..20: mol_type = other RNA
gaaccctctttattttctac

SEQ ID NO: 6840 - RNA, 20 nt, synthetic construct
  source 1..20: mol_type = other RNA
gaactacatataaactacaa

SEQ ID NO: 6841 - RNA, 20 nt, synthetic construct
  source 1..20: mol_type = other RNA
gaactcaactcaaaacttga

SEQ ID NO: 6842 - RNA, 20 nt, synthetic construct
  source 1..20: mol_type = other RNA
gaactgagaagaactacata

SEQ ID NO: 6843 - RNA, 20 nt, synthetic construct
  source 1..20: mol_type = other RNA
gaagaaaaaattctacttca

SEQ ID NO: 6844 - RNA, 20 nt, synthetic construct
  source 1..20: mol_type = other RNA
gaagaaaaggaactgagaag

SEQ ID NO: 6845 - RNA, 20 nt, synthetic construct
  source 1..20: mol_type = other RNA
gaagaactacatataaacta

SEQ ID NO: 6846 - RNA, 20 nt, synthetic construct
  source 1..20: mol_type = other RNA
gaagaagaaaaggaactgag

SEQ ID NO: 6847 - RNA, 20 nt, synthetic construct
  source 1..20: mol_type = other RNA
gaagagcaactaactaactt

SEQ ID NO: 6848 - RNA, 20 nt, synthetic construct
  source 1..20: mol_type = other RNA
gaagaggtaaagaatatgtc

SEQ ID NO: 6849 - RNA, 20 nt, synthetic construct
  source 1..20: mol_type = other RNA
gaaggaggccattggctaaa

SEQ ID NO: 6850 - RNA, 20 nt, synthetic construct
  source 1..20: mol_type = other RNA
gaagggccaaattaatgaca

SEQ ID NO: 6851 - RNA, 20 nt, synthetic construct
  source 1..20: mol_type = other RNA
gaagtaacttcacttaaagt

SEQ ID NO: 6852 - RNA, 20 nt, synthetic construct
  source 1..20: mol_type = other RNA
gaagtagaattttttcttct

SEQ ID NO: 6853 - RNA, 20 nt, synthetic construct
  source 1..20: mol_type = other RNA
gaagttacttctgggtgttc

SEQ ID NO: 6854 - RNA, 20 nt, synthetic construct
  source 1..20: mol_type = other RNA
gaatatgtcacttgaactca

SEQ ID NO: 6855 - RNA, 20 nt, synthetic construct
  source 1..20: mol_type = other RNA
gaatcaaatgatgaattgtc

SEQ ID NO: 6856 - RNA, 20 nt, synthetic construct
  source 1..20: mol_type = other RNA
gaattaagttagttagttgc

SEQ ID NO: 6857 - RNA, 20 nt, synthetic construct
  source 1..20: mol_type = other RNA
gaattgatcaagacaattca

SEQ ID NO: 6858 - RNA, 20 nt, synthetic construct
  source 1..20: mol_type = other RNA
gaattgtcttgatcaattct

SEQ ID NO: 6859 - RNA, 20 nt, synthetic construct
  source 1..20: mol_type = other RNA
gaattttttcttctaggagg

SEQ ID NO: 6860 - RNA, 20 nt, synthetic construct
  source 1..20: mol_type = other RNA
gacaaagtctttaagaccat

SEQ ID NO: 6861 - RNA, 20 nt, synthetic construct
  source 1..20: mol_type = other RNA
gacaattcatcatttgattc

SEQ ID NO: 6862 - RNA, 20 nt, synthetic construct
  source 1..20: mol_type = other RNA
gacatattctttacctcttc

SEQ ID NO: 6863 - RNA, 20 nt, synthetic construct
  source 1..20: mol_type = other RNA
gacatatttcaaaaactcaa

SEQ ID NO: 6864 - RNA, 20 nt, synthetic construct
  source 1..20: mol_type = other RNA
gacatggtcttaaagacttt

SEQ ID NO: 6865 - RNA, 20 nt, synthetic construct
  source 1..20: mol_type = other RNA
gaccatgtcccaactgaagg

SEQ ID NO: 6866 - RNA, 20 nt, synthetic construct
  source 1..20: mol_type = other RNA
gacgaagggccaaattaatg

SEQ ID NO: 6867 - RNA, 20 nt, synthetic construct
  source 1..20: mol_type = other RNA
gacgatgtaaaaattttagc

SEQ ID NO: 6868 - RNA, 20 nt, synthetic construct
  source 1..20: mol_type = other RNA
gactgatcaaatatgttgag

SEQ ID NO: 6869 - RNA, 20 nt, synthetic construct
  source 1..20: mol_type = other RNA
gacttgtagtttatatgtag

SEQ ID NO: 6870 - RNA, 20 nt, synthetic construct
  source 1..20: mol_type = other RNA
gactttgtccataagacgaa

SEQ ID NO: 6871 - RNA, 20 nt, synthetic construct
  source 1..20: mol_type = other RNA
gagaagaactacatataaac

SEQ ID NO: 6872 - RNA, 20 nt, synthetic construct
  source 1..20: mol_type = other RNA
gagaatcaaatgatgaattg

SEQ ID NO: 6873 - RNA, 20 nt, synthetic construct
  source 1..20: mol_type = other RNA
gagatagagaatcaaatgat

SEQ ID NO: 6874 - RNA, 20 nt, synthetic construct
  source 1..20: mol_type = other RNA
gagcaactaactaacttaat

SEQ ID NO: 6875 - RNA, 20 nt, synthetic construct
  source 1..20: mol_type = other RNA
gagccaaaatcaagatttgc

SEQ ID NO: 6876 - RNA, 20 nt, synthetic construct
  source 1..20: mol_type = other RNA
gaggaaataactagaggaac

SEQ ID NO: 6877 - RNA, 20 nt, synthetic construct
  source 1..20: mol_type = other RNA
gaggaacaataaaaagaagg

SEQ ID NO: 6878 - RNA, 20 nt, synthetic construct
  source 1..20: mol_type = other RNA
gaggccattggctaaaattt

SEQ ID NO: 6879 - RNA, 20 nt, synthetic construct
  source 1..20: mol_type = other RNA
gaggctttcaagttttgagt

SEQ ID NO: 6880 - RNA, 20 nt, synthetic construct
  source 1..20: mol_type = other RNA
gaggtaaagaatatgtcact

SEQ ID NO: 6881 - RNA, 20 nt, synthetic construct
  source 1..20: mol_type = other RNA
gagttcaagtgacatattct

SEQ ID NO: 6882 - RNA, 20 nt, synthetic construct
  source 1..20: mol_type = other RNA
gagttgagttcaagtgacat

SEQ ID NO: 6883 - RNA, 20 nt, synthetic construct
  source 1..20: mol_type = other RNA
gagtttcaggttgattttga

SEQ ID NO: 6884 - RNA, 20 nt, synthetic construct
  source 1..20: mol_type = other RNA
gagtttttgaaatatgtcat

SEQ ID NO: 6885 - RNA, 20 nt, synthetic construct
  source 1..20: mol_type = other RNA
gatagagaatcaaatgatga

SEQ ID NO: 6886 - RNA, 20 nt, synthetic construct
  source 1..20: mol_type = other RNA
gatagatcataaaaagactg

SEQ ID NO: 6887 - RNA, 20 nt, synthetic construct
  source 1..20: mol_type = other RNA
gatcaaatatgttgagtttt

SEQ ID NO: 6888 - RNA, 20 nt, synthetic construct
  source 1..20: mol_type = other RNA
gatcaagacaattcatcatt

SEQ ID NO: 6889 - RNA, 20 nt, synthetic construct
  source 1..20: mol_type = other RNA
gatcaattctggaggaaata

SEQ ID NO: 6890 - RNA, 20 nt, synthetic construct
  source 1..20: mol_type = other RNA
gatcagtctttttatgatct

SEQ ID NO: 6891 - RNA, 20 nt, synthetic construct
  source 1..20: mol_type = other RNA
gatcataaaaagactgatca

SEQ ID NO: 6892 - RNA, 20 nt, synthetic construct
  source 1..20: mol_type = other RNA
gatctatcgctgcaaaccag

SEQ ID NO: 6893 - RNA, 20 nt, synthetic construct
  source 1..20: mol_type = other RNA
gatgaattgtcttgatcaat

SEQ ID NO: 6894 - RNA, 20 nt, synthetic construct
  source 1..20: mol_type = other RNA
gatgtaaaaattttagccaa

SEQ ID NO: 6895 - RNA, 20 nt, synthetic construct
  source 1..20: mol_type = other RNA
gattctctatctccagagcc

SEQ ID NO: 6896 - RNA, 20 nt, synthetic construct
  source 1..20: mol_type = other RNA
gatttcactggtttgcagcg

SEQ ID NO: 6897 - RNA, 20 nt, synthetic construct
  source 1..20: mol_type = other RNA
gatttgctatgttagacgat

SEQ ID NO: 6898 - RNA, 20 nt, synthetic construct
  source 1..20: mol_type = other RNA
gattttgaattaagttagtt

SEQ ID NO: 6899 - RNA, 20 nt, synthetic construct
  source 1..20: mol_type = other RNA
gattttggctctggagatag

SEQ ID NO: 6900 - RNA, 20 nt, synthetic construct
  source 1..20: mol_type = other RNA
gcaaaccagtgaaatcaaag

SEQ ID NO: 6901 - RNA, 20 nt, synthetic construct
  source 1..20: mol_type = other RNA
gcaaatcttgattttggctc

SEQ ID NO: 6902 - RNA, 20 nt, synthetic construct
  source 1..20: mol_type = other RNA
gcaactaactaacttaattc

SEQ ID NO: 6903 - RNA, 20 nt, synthetic construct
  source 1..20: mol_type = other RNA
gcagcgatagatcataaaaa

SEQ ID NO: 6904 - RNA, 20 nt, synthetic construct
  source 1..20: mol_type = other RNA
gccaaaatcaagatttgcta

SEQ ID NO: 6905 - RNA, 20 nt, synthetic construct
  source 1..20: mol_type = other RNA
gccaaattaatgacatattt

SEQ ID NO: 6906 - RNA, 20 nt, synthetic construct
  source 1..20: mol_type = other RNA
gccaatggcctccttcagtt

SEQ ID NO: 6907 - RNA, 20 nt, synthetic construct
  source 1..20: mol_type = other RNA
gccattggctaaaattttta

SEQ ID NO: 6908 - RNA, 20 nt, synthetic construct
  source 1..20: mol_type = other RNA
gcccttcgtcttatggacaa

SEQ ID NO: 6909 - RNA, 20 nt, synthetic construct
  source 1..20: mol_type = other RNA
gcctcctagaagaaaaaatt

SEQ ID NO: 6910 - RNA, 20 nt, synthetic construct
  source 1..20: mol_type = other RNA
gcctccttcagttgggacat

SEQ ID NO: 6911 - RNA, 20 nt, synthetic construct
  source 1..20: mol_type = other RNA
gcgatagatcataaaaagac

SEQ ID NO: 6912 - RNA, 20 nt, synthetic construct
  source 1..20: mol_type = other RNA
gctaaaatttttacatcgtc

SEQ ID NO: 6913 - RNA, 20 nt, synthetic construct
  source 1..20: mol_type = other RNA
gctatgttagacgatgtaaa

SEQ ID NO: 6914 - RNA, 20 nt, synthetic construct
  source 1..20: mol_type = other RNA
gctccttctttttattgttc

SEQ ID NO: 6915 - RNA, 20 nt, synthetic construct
  source 1..20: mol_type = other RNA
gctctggagatagagaatca

SEQ ID NO: 6916 - RNA, 20 nt, synthetic construct
  source 1..20: mol_type = other RNA
gctcttctaaatatttcact

SEQ ID NO: 6917 - RNA, 20 nt, synthetic construct
  source 1..20: mol_type = other RNA
gctgcaaaccagtgaaatca

SEQ ID NO: 6918 - RNA, 20 nt, synthetic construct
  source 1..20: mol_type = other RNA
gctttcaagttttgagttga

SEQ ID NO: 6919 - RNA, 20 nt, synthetic construct
  source 1..20: mol_type = other RNA
ggaaataactagaggaacaa

SEQ ID NO: 6920 - RNA, 20 nt, synthetic construct
  source 1..20: mol_type = other RNA
ggaacaataaaaagaaggag

SEQ ID NO: 6921 - RNA, 20 nt, synthetic construct
  source 1..20: mol_type = other RNA
ggaactgagaagaactacat

SEQ ID NO: 6922 - RNA, 20 nt, synthetic construct
  source 1..20: mol_type = other RNA
ggacaaagtctttaagacca

SEQ ID NO: 6923 - RNA, 20 nt, synthetic construct
  source 1..20: mol_type = other RNA
ggacatggtcttaaagactt

SEQ ID NO: 6924 - RNA, 20 nt, synthetic construct
  source 1..20: mol_type = other RNA
ggagatagagaatcaaatga

SEQ ID NO: 6925 - RNA, 20 nt, synthetic construct
  source 1..20: mol_type = other RNA
ggaggaaataactagaggaa

SEQ ID NO: 6926 - RNA, 20 nt, synthetic construct
  source 1..20: mol_type = other RNA
ggaggccattggctaaaatt

SEQ ID NO: 6927 - RNA, 20 nt, synthetic construct
  source 1..20: mol_type = other RNA
ggaggctttcaagttttgag

SEQ ID NO: 6928 - RNA, 20 nt, synthetic construct
  source 1..20: mol_type = other RNA
ggagtttcaggttgattttg

SEQ ID NO: 6929 - RNA, 20 nt, synthetic construct
  source 1..20: mol_type = other RNA
ggccaaattaatgacatatt

SEQ ID NO: 6930 - RNA, 20 nt, synthetic construct
  source 1..20: mol_type = other RNA
ggccattggctaaaattttt

SEQ ID NO: 6931 - RNA, 20 nt, synthetic construct
  source 1..20: mol_type = other RNA
ggcccttcgtcttatggaca

SEQ ID NO: 6932 - RNA, 20 nt, synthetic construct
  source 1..20: mol_type = other RNA
ggcctccttcagttgggaca

SEQ ID NO: 6933 - RNA, 20 nt, synthetic construct
  source 1..20: mol_type = other RNA
ggctaaaatttttacatcgt

SEQ ID NO: 6934 - RNA, 20 nt, synthetic construct
  source 1..20: mol_type = other RNA
ggctctggagatagagaatc

SEQ ID NO: 6935 - RNA, 20 nt, synthetic construct
  source 1..20: mol_type = other RNA
ggctttcaagttttgagttg

SEQ ID NO: 6936 - RNA, 20 nt, synthetic construct
  source 1..20: mol_type = other RNA
gggacatggtcttaaagact

SEQ ID NO: 6937 - RNA, 20 nt, synthetic construct
  source 1..20: mol_type = other RNA
gggccaaattaatgacatat

SEQ ID NO: 6938 - RNA, 20 nt, synthetic construct
  source 1..20: mol_type = other RNA
gggtgttctggagtttcagg

SEQ ID NO: 6939 - RNA, 20 nt, synthetic construct
  source 1..20: mol_type = other RNA
ggtaaagaatatgtcacttg

SEQ ID NO: 6940 - RNA, 20 nt, synthetic construct
  source 1..20: mol_type = other RNA
ggtcttaaagactttgtcca

SEQ ID NO: 6941 - RNA, 20 nt, synthetic construct
  source 1..20: mol_type = other RNA
ggtgttctggagtttcaggt

SEQ ID NO: 6942 - RNA, 20 nt, synthetic construct
  source 1..20: mol_type = other RNA
ggttgattttgaattaagtt

SEQ ID NO: 6943 - RNA, 20 nt, synthetic construct
  source 1..20: mol_type = other RNA
ggtttgcagcgatagatcat

SEQ ID NO: 6944 - RNA, 20 nt, synthetic construct
  source 1..20: mol_type = other RNA
gtaaaaattttagccaatgg

SEQ ID NO: 6945 - RNA, 20 nt, synthetic construct
  source 1..20: mol_type = other RNA
gtaaagaatatgtcacttga

SEQ ID NO: 6946 - RNA, 20 nt, synthetic construct
  source 1..20: mol_type = other RNA
gtaacttcacttaaagtaag

SEQ ID NO: 6947 - RNA, 20 nt, synthetic construct
  source 1..20: mol_type = other RNA
gtaagtagaaaataaagagg

SEQ ID NO: 6948 - RNA, 20 nt, synthetic construct
  source 1..20: mol_type = other RNA
gtagaattttttcttctagg

SEQ ID NO: 6949 - RNA, 20 nt, synthetic construct
  source 1..20: mol_type = other RNA
gtagttcttctcagttcctt

SEQ ID NO: 6950 - RNA, 20 nt, synthetic construct
  source 1..20: mol_type = other RNA
gtagtttatatgtagttctt

SEQ ID NO: 6951 - RNA, 20 nt, synthetic construct
  source 1..20: mol_type = other RNA
gtcaaaaatgaagaggtaaa

SEQ ID NO: 6952 - RNA, 20 nt, synthetic construct
  source 1..20: mol_type = other RNA
gtcacttgaactcaactcaa

SEQ ID NO: 6953 - RNA, 20 nt, synthetic construct
  source 1..20: mol_type = other RNA
gtcattaatttggcccttcg

SEQ ID NO: 6954 - RNA, 20 nt, synthetic construct
  source 1..20: mol_type = other RNA
gtccataagacgaagggcca

SEQ ID NO: 6955 - RNA, 20 nt, synthetic construct
  source 1..20: mol_type = other RNA
gtcccaactgaaggaggcca

SEQ ID NO: 6956 - RNA, 20 nt, synthetic construct
  source 1..20: mol_type = other RNA
gtctaacatagcaaatcttg

SEQ ID NO: 6957 - RNA, 20 nt, synthetic construct
  source 1..20: mol_type = other RNA
gtcttaaagactttgtccat

SEQ ID NO: 6958 - RNA, 20 nt, synthetic construct
  source 1..20: mol_type = other RNA
gtcttatggacaaagtcttt

SEQ ID NO: 6959 - RNA, 20 nt, synthetic construct
  source 1..20: mol_type = other RNA
gtcttgatcaattctggagg

SEQ ID NO: 6960 - RNA, 20 nt, synthetic construct
  source 1..20: mol_type = other RNA
gtctttaagaccatgtccca

SEQ ID NO: 6961 - RNA, 20 nt, synthetic construct
  source 1..20: mol_type = other RNA
gtctttttatgatctatcgc

SEQ ID NO: 6962 - RNA, 20 nt, synthetic construct
  source 1..20: mol_type = other RNA
gtgaaatatttagaagagca

SEQ ID NO: 6963 - RNA, 20 nt, synthetic construct
  source 1..20: mol_type = other RNA
gtgaaatcaaagaagaagaa

SEQ ID NO: 6964 - RNA, 20 nt, synthetic construct
  source 1..20: mol_type = other RNA
gtgaagttacttctgggtgt

SEQ ID NO: 6965 - RNA, 20 nt, synthetic construct
  source 1..20: mol_type = other RNA
gtgacatattctttacctct

SEQ ID NO: 6966 - RNA, 20 nt, synthetic construct
  source 1..20: mol_type = other RNA
gtgttctggagtttcaggtt

SEQ ID NO: 6967 - RNA, 20 nt, synthetic construct
  source 1..20: mol_type = other RNA
gttacttctgggtgttctgg

SEQ ID NO: 6968 - RNA, 20 nt, synthetic construct
  source 1..20: mol_type = other RNA
gttagacgatgtaaaaattt

SEQ ID NO: 6969 - RNA, 20 nt, synthetic construct
  source 1..20: mol_type = other RNA
gttagttagttgctcttcta

SEQ ID NO: 6970 - RNA, 20 nt, synthetic construct
  source 1..20: mol_type = other RNA
gttagttgctcttctaaata

SEQ ID NO: 6971 - RNA, 20 nt, synthetic construct
  source 1..20: mol_type = other RNA
gttatttcctccagaattga

SEQ ID NO: 6972 - RNA, 20 nt, synthetic construct
  source 1..20: mol_type = other RNA
gttcaagtgacatattcttt

SEQ ID NO: 6973 - RNA, 20 nt, synthetic construct
  source 1..20: mol_type = other RNA
gttcacaattaagctccttc

SEQ ID NO: 6974 - RNA, 20 nt, synthetic construct
  source 1..20: mol_type = other RNA
gttcctctagttatttcctc

SEQ ID NO: 6975 - RNA, 20 nt, synthetic construct
  source 1..20: mol_type = other RNA
gttccttttcttcttctttg

SEQ ID NO: 6976 - RNA, 20 nt, synthetic construct
  source 1..20: mol_type = other RNA
gttctggagtttcaggttga

SEQ ID NO: 6977 - RNA, 20 nt, synthetic construct
  source 1..20: mol_type = other RNA
gttcttctcagttccttttc

SEQ ID NO: 6978 - RNA, 20 nt, synthetic construct
  source 1..20: mol_type = other RNA
gttgaagtagaattttttct

SEQ ID NO: 6979 - RNA, 20 nt, synthetic construct
  source 1..20: mol_type = other RNA
gttgagttcaagtgacatat

SEQ ID NO: 6980 - RNA, 20 nt, synthetic construct
  source 1..20: mol_type = other RNA
gttgagtttttgaaatatgt

SEQ ID NO: 6981 - RNA, 20 nt, synthetic construct
  source 1..20: mol_type = other RNA
gttgattttgaattaagtta

SEQ ID NO: 6982 - RNA, 20 nt, synthetic construct
  source 1..20: mol_type = other RNA
gttgctcttctaaatatttc

SEQ ID NO: 6983 - RNA, 20 nt, synthetic construct
  source 1..20: mol_type = other RNA
gttgggacatggtcttaaag

SEQ ID NO: 6984 - RNA, 20 nt, synthetic construct
  source 1..20: mol_type = other RNA
gtttatatgtagttcttctc

SEQ ID NO: 6985 - RNA, 20 nt, synthetic construct
  source 1..20: mol_type = other RNA
gtttcaggttgattttgaat

SEQ ID NO: 6986 - RNA, 20 nt, synthetic construct
  source 1..20: mol_type = other RNA
gtttgcagcgatagatcata

SEQ ID NO: 6987 - RNA, 20 nt, synthetic construct
  source 1..20: mol_type = other RNA
gttttgagttgagttcaagt

SEQ ID NO: 6988 - RNA, 20 nt, synthetic construct
  source 1..20: mol_type = other RNA
gtttttgaaatatgtcatta

SEQ ID NO: 6989 - RNA, 20 nt, synthetic construct
  source 1..20: mol_type = other RNA
taaaaagaaggagcttaatt

SEQ ID NO: 6990 - RNA, 20 nt, synthetic construct
  source 1..20: mol_type = other RNA
taaaaagactgatcaaatat

SEQ ID NO: 6991 - RNA, 20 nt, synthetic construct
  source 1..20: mol_type = other RNA
taaaaattttagccaatggc

SEQ ID NO: 6992 - RNA, 20 nt, synthetic construct
  source 1..20: mol_type = other RNA
taaaatttttacatcgtcta

SEQ ID NO: 6993 - RNA, 20 nt, synthetic construct
  source 1..20: mol_type = other RNA
taaactacaagtcaaaaatg

SEQ ID NO: 6994 - RNA, 20 nt, synthetic construct
  source 1..20: mol_type = other RNA
taaagaatatgtcacttgaa

SEQ ID NO: 6995 - RNA, 20 nt, synthetic construct
  source 1..20: mol_type = other RNA
taaagactttgtccataaga

SEQ ID NO: 6996 - RNA, 20 nt, synthetic construct
  source 1..20: mol_type = other RNA
taacatagcaaatcttgatt

SEQ ID NO: 6997 - RNA, 20 nt, synthetic construct
  source 1..20: mol_type = other RNA
taactagaggaacaataaaa

SEQ ID NO: 6998 - RNA, 20 nt, synthetic construct
  source 1..20: mol_type = other RNA
taacttaattcaaaatcaac

SEQ ID NO: 6999 - RNA, 20 nt, synthetic construct
  source 1..20: mol_type = other RNA
taacttcacttaaagtaagt

SEQ ID NO: 7000 - RNA, 20 nt, synthetic construct
  source 1..20: mol_type = other RNA
taagaccatgtcccaactga

SEQ ID NO: 7001 - RNA, 20 nt, synthetic construct
  source 1..20: mol_type = other RNA
taagacgaagggccaaatta

SEQ ID NO: 7002 - RNA, 20 nt, synthetic construct
  source 1..20: mol_type = other RNA
taagctccttctttttattg

SEQ ID NO: 7003 - RNA, 20 nt, synthetic construct
  source 1..20: mol_type = other RNA
taagtagaaaataaagaggg

SEQ ID NO: 7004 - RNA, 20 nt, synthetic construct
  source 1..20: mol_type = other RNA
taagtgaagttacttctggg

SEQ ID NO: 7005 - RNA, 20 nt, synthetic construct
  source 1..20: mol_type = other RNA
taagttagttagttgctctt

SEQ ID NO: 7006 - RNA, 20 nt, synthetic construct
  source 1..20: mol_type = other RNA
taatgacatatttcaaaaac

SEQ ID NO: 7007 - RNA, 20 nt, synthetic construct
  source 1..20: mol_type = other RNA
taattcaaaatcaacctgaa

SEQ ID NO: 7008 - RNA, 20 nt, synthetic construct
  source 1..20: mol_type = other RNA
taatttggcccttcgtctta

SEQ ID NO: 7009 - RNA, 20 nt, synthetic construct
  source 1..20: mol_type = other RNA
tacaagtcaaaaatgaagag

SEQ ID NO: 7010 - RNA, 20 nt, synthetic construct
  source 1..20: mol_type = other RNA
tacatataaactacaagtca

SEQ ID NO: 7011 - RNA, 20 nt, synthetic construct
  source 1..20: mol_type = other RNA
tacatcgtctaacatagcaa

SEQ ID NO: 7012 - RNA, 20 nt, synthetic construct
  source 1..20: mol_type = other RNA
tacctcttcatttttgactt

SEQ ID NO: 7013 - RNA, 20 nt, synthetic construct
  source 1..20: mol_type = other RNA
tacttactttaagtgaagtt

SEQ ID NO: 7014 - RNA, 20 nt, synthetic construct
  source 1..20: mol_type = other RNA
tacttcaacaaaaagtgaaa

SEQ ID NO: 7015 - RNA, 20 nt, synthetic construct
  source 1..20: mol_type = other RNA
tacttctgggtgttctggag

SEQ ID NO: 7016 - RNA, 20 nt, synthetic construct
  source 1..20: mol_type = other RNA
tactttaagtgaagttactt

SEQ ID NO: 7017 - RNA, 20 nt, synthetic construct
  source 1..20: mol_type = other RNA
tagaagaaaaaattctactt

SEQ ID NO: 7018 - RNA, 20 nt, synthetic construct
  source 1..20: mol_type = other RNA
tagaagagcaactaactaac

SEQ ID NO: 7019 - RNA, 20 nt, synthetic construct
  source 1..20: mol_type = other RNA
tagaattttttcttctagga

SEQ ID NO: 7020 - RNA, 20 nt, synthetic construct
  source 1..20: mol_type = other RNA
tagacgatgtaaaaatttta

SEQ ID NO: 7021 - RNA, 20 nt, synthetic construct
  source 1..20: mol_type = other RNA
tagagaatcaaatgatgaat

SEQ ID NO: 7022 - RNA, 20 nt, synthetic construct
  source 1..20: mol_type = other RNA
tagaggaacaataaaaagaa

SEQ ID NO: 7023 - RNA, 20 nt, synthetic construct
  source 1..20: mol_type = other RNA
tagatcataaaaagactgat

SEQ ID NO: 7024 - RNA, 20 nt, synthetic construct
  source 1..20: mol_type = other RNA
tagcaaatcttgattttggc

SEQ ID NO: 7025 - RNA, 20 nt, synthetic construct
  source 1..20: mol_type = other RNA
tagccaatggcctccttcag

SEQ ID NO: 7026 - RNA, 20 nt, synthetic construct
  source 1..20: mol_type = other RNA
taggaggctttcaagttttg

SEQ ID NO: 7027 - RNA, 20 nt, synthetic construct
  source 1..20: mol_type = other RNA
tagttagttgctcttctaaa

SEQ ID NO: 7028 - RNA, 20 nt, synthetic construct
  source 1..20: mol_type = other RNA
tagttatttcctccagaatt

SEQ ID NO: 7029 - RNA, 20 nt, synthetic construct
  source 1..20: mol_type = other RNA
tagttcttctcagttccttt

SEQ ID NO: 7030 - RNA, 20 nt, synthetic construct
  source 1..20: mol_type = other RNA
tagttgctcttctaaatatt

SEQ ID NO: 7031 - RNA, 20 nt, synthetic construct
  source 1..20: mol_type = other RNA
tagtttatatgtagttcttc

SEQ ID NO: 7032 - RNA, 20 nt, synthetic construct
  source 1..20: mol_type = other RNA
tataaactacaagtcaaaaa

SEQ ID NO: 7033 - RNA, 20 nt, synthetic construct
  source 1..20: mol_type = other RNA
tatatgtagttcttctcagt

SEQ ID NO: 7034 - RNA, 20 nt, synthetic construct
  source 1..20: mol_type = other RNA
tatcgctgcaaaccagtgaa

SEQ ID NO: 7035 - RNA, 20 nt, synthetic construct
  source 1..20: mol_type = other RNA
tatctccagagccaaaatca

SEQ ID NO: 7036 - RNA, 20 nt, synthetic construct
  source 1..20: mol_type = other RNA
tatgatctatcgctgcaaac

SEQ ID NO: 7037 - RNA, 20 nt, synthetic construct
  source 1..20: mol_type = other RNA
tatggacaaagtctttaaga

SEQ ID NO: 7038 - RNA, 20 nt, synthetic construct
  source 1..20: mol_type = other RNA
tatgtagttcttctcagttc

SEQ ID NO: 7039 - RNA, 20 nt, synthetic construct
  source 1..20: mol_type = other RNA
tatgtcacttgaactcaact

SEQ ID NO: 7040 - RNA, 20 nt, synthetic construct
  source 1..20: mol_type = other RNA
tatgtcattaatttggccct

SEQ ID NO: 7041 - RNA, 20 nt, synthetic construct
  source 1..20: mol_type = other RNA
tatgttagacgatgtaaaaa

SEQ ID NO: 7042 - RNA, 20 nt, synthetic construct
  source 1..20: mol_type = other RNA
tatgttgagtttttgaaata

SEQ ID NO: 7043 - RNA, 20 nt, synthetic construct
  source 1..20: mol_type = other RNA
tattctttacctcttcattt

SEQ ID NO: 7044 - RNA, 20 nt, synthetic construct
  source 1..20: mol_type = other RNA
tattgttcctctagttattt

SEQ ID NO: 7045 - RNA, 20 nt, synthetic construct
  source 1..20: mol_type = other RNA
tatttagaagagcaactaac

SEQ ID NO: 7046 - RNA, 20 nt, synthetic construct
  source 1..20: mol_type = other RNA
tatttcaaaaactcaacata

SEQ ID NO: 7047 - RNA, 20 nt, synthetic construct
  source 1..20: mol_type = other RNA
tatttcactttttgttgaag

SEQ ID NO: 7048 - RNA, 20 nt, synthetic construct
  source 1..20: mol_type = other RNA
tatttcctccagaattgatc

SEQ ID NO: 7049 - RNA, 20 nt, synthetic construct
  source 1..20: mol_type = other RNA
tatttgatcagtctttttat

SEQ ID NO: 7050 - RNA, 20 nt, synthetic construct
  source 1..20: mol_type = other RNA
tattttctacttactttaag

SEQ ID NO: 7051 - RNA, 20 nt, synthetic construct
  source 1..20: mol_type = other RNA
tcaaaaactcaacatatttg

SEQ ID NO: 7052 - RNA, 20 nt, synthetic construct
  source 1..20: mol_type = other RNA
tcaaaaatgaagaggtaaag

SEQ ID NO: 7053 - RNA, 20 nt, synthetic construct
  source 1..20: mol_type = other RNA
tcaaaacttgaaagcctcct

SEQ ID NO: 7054 - RNA, 20 nt, synthetic construct
  source 1..20: mol_type = other RNA
tcaaaatcaacctgaaactc

SEQ ID NO: 7055 - RNA, 20 nt, synthetic construct
  source 1..20: mol_type = other RNA
tcaaagaagaagaaaaggaa

SEQ ID NO: 7056 - RNA, 20 nt, synthetic construct
  source 1..20: mol_type = other RNA
tcaaatatgttgagtttttg

SEQ ID NO: 7057 - RNA, 20 nt, synthetic construct
  source 1..20: mol_type = other RNA
tcaaatgatgaattgtcttg

SEQ ID NO: 7058 - RNA, 20 nt, synthetic construct
  source 1..20: mol_type = other RNA
tcaacaaaaagtgaaatatt

SEQ ID NO: 7059 - RNA, 20 nt, synthetic construct
  source 1..20: mol_type = other RNA
tcaacatatttgatcagtct

SEQ ID NO: 7060 - RNA, 20 nt, synthetic construct
  source 1..20: mol_type = other RNA
tcaacctgaaactccagaac

SEQ ID NO: 7061 - RNA, 20 nt, synthetic construct
  source 1..20: mol_type = other RNA
tcaactcaaaacttgaaagc

SEQ ID NO: 7062 - RNA, 20 nt, synthetic construct
  source 1..20: mol_type = other RNA
tcaagacaattcatcatttg

SEQ ID NO: 7063 - RNA, 20 nt, synthetic construct
  source 1..20: mol_type = other RNA
tcaagatttgctatgttaga

SEQ ID NO: 7064 - RNA, 20 nt, synthetic construct
  source 1..20: mol_type = other RNA
tcaagtgacatattctttac

SEQ ID NO: 7065 - RNA, 20 nt, synthetic construct
  source 1..20: mol_type = other RNA
tcaagttttgagttgagttc

SEQ ID NO: 7066 - RNA, 20 nt, synthetic construct
  source 1..20: mol_type = other RNA
tcaattctggaggaaataac

SEQ ID NO: 7067 - RNA, 20 nt, synthetic construct
  source 1..20: mol_type = other RNA
tcacaattaagctccttctt

SEQ ID NO: 7068 - RNA, 20 nt, synthetic construct
  source 1..20: mol_type = other RNA
tcactggtttgcagcgatag

SEQ ID NO: 7069 - RNA, 20 nt, synthetic construct
  source 1..20: mol_type = other RNA
tcacttaaagtaagtagaaa

SEQ ID NO: 7070 - RNA, 20 nt, synthetic construct
  source 1..20: mol_type = other RNA
tcacttgaactcaactcaaa

SEQ ID NO: 7071 - RNA, 20 nt, synthetic construct
  source 1..20: mol_type = other RNA
tcactttttgttgaagtaga

SEQ ID NO: 7072 - RNA, 20 nt, synthetic construct
  source 1..20: mol_type = other RNA
tcaggttgattttgaattaa

SEQ ID NO: 7073 - RNA, 20 nt, synthetic construct
  source 1..20: mol_type = other RNA
tcagtctttttatgatctat

SEQ ID NO: 7074 - RNA, 20 nt, synthetic construct
  source 1..20: mol_type = other RNA
tcagttccttttcttcttct

SEQ ID NO: 7075 - RNA, 20 nt, synthetic construct
  source 1..20: mol_type = other RNA
tcagttgggacatggtctta

SEQ ID NO: 7076 - RNA, 20 nt, synthetic construct
  source 1..20: mol_type = other RNA
tcataaaaagactgatcaaa

SEQ ID NO: 7077 - RNA, 20 nt, synthetic construct
  source 1..20: mol_type = other RNA
tcatcatttgattctctatc

SEQ ID NO: 7078 - RNA, 20 nt, synthetic construct
  source 1..20: mol_type = other RNA
tcattaatttggcccttcgt

SEQ ID NO: 7079 - RNA, 20 nt, synthetic construct
  source 1..20: mol_type = other RNA
tcatttgattctctatctcc

SEQ ID NO: 7080 - RNA, 20 nt, synthetic construct
  source 1..20: mol_type = other RNA
tcatttttgacttgtagttt

SEQ ID NO: 7081 - RNA, 20 nt, synthetic construct
  source 1..20: mol_type = other RNA
tccagaacacccagaagtaa

SEQ ID NO: 7082 - RNA, 20 nt, synthetic construct
  source 1..20: mol_type = other RNA
tccagaattgatcaagacaa

SEQ ID NO: 7083 - RNA, 20 nt, synthetic construct
  source 1..20: mol_type = other RNA
tccagagccaaaatcaagat

SEQ ID NO: 7084 - RNA, 20 nt, synthetic construct
  source 1..20: mol_type = other RNA
tccataagacgaagggccaa

SEQ ID NO: 7085 - RNA, 20 nt, synthetic construct
  source 1..20: mol_type = other RNA
tcccaactgaaggaggccat

SEQ ID NO: 7086 - RNA, 20 nt, synthetic construct
  source 1..20: mol_type = other RNA
tcctagaagaaaaaattcta

SEQ ID NO: 7087 - RNA, 20 nt, synthetic construct
  source 1..20: mol_type = other RNA
tcctccagaattgatcaaga

SEQ ID NO: 7088 - RNA, 20 nt, synthetic construct
  source 1..20: mol_type = other RNA
tcctctagttatttcctcca

SEQ ID NO: 7089 - RNA, 20 nt, synthetic construct
  source 1..20: mol_type = other RNA
tccttcagttgggacatggt

SEQ ID NO: 7090 - RNA, 20 nt, synthetic construct
  source 1..20: mol_type = other RNA
tccttctttttattgttcct

SEQ ID NO: 7091 - RNA, 20 nt, synthetic construct
  source 1..20: mol_type = other RNA
tccttttcttcttctttgat

SEQ ID NO: 7092 - RNA, 20 nt, synthetic construct
  source 1..20: mol_type = other RNA
tcgctgcaaaccagtgaaat

SEQ ID NO: 7093 - RNA, 20 nt, synthetic construct
  source 1..20: mol_type = other RNA
tcgtctaacatagcaaatct

SEQ ID NO: 7094 - RNA, 20 nt, synthetic construct
  source 1..20: mol_type = other RNA
tcgtcttatggacaaagtct

SEQ ID NO: 7095 - RNA, 20 nt, synthetic construct
  source 1..20: mol_type = other RNA
tctaaatatttcactttttg

SEQ ID NO: 7096 - RNA, 20 nt, synthetic construct
  source 1..20: mol_type = other RNA
tctaacatagcaaatcttga

SEQ ID NO: 7097 - RNA, 20 nt, synthetic construct
  source 1..20: mol_type = other RNA
tctacttactttaagtgaag

SEQ ID NO: 7098 - RNA, 20 nt, synthetic construct
  source 1..20: mol_type = other RNA
tctacttcaacaaaaagtga

SEQ ID NO: 7099 - RNA, 20 nt, synthetic construct
  source 1..20: mol_type = other RNA
tctaggaggctttcaagttt

SEQ ID NO: 7100 - RNA, 20 nt, synthetic construct
  source 1..20: mol_type = other RNA
tctagttatttcctccagaa

SEQ ID NO: 7101 - RNA, 20 nt, synthetic construct
  source 1..20: mol_type = other RNA
tctatcgctgcaaaccagtg

SEQ ID NO: 7102 - RNA, 20 nt, synthetic construct
  source 1..20: mol_type = other RNA
tctatctccagagccaaaat

SEQ ID NO: 7103 - RNA, 20 nt, synthetic construct
  source 1..20: mol_type = other RNA
tctcagttccttttcttctt

SEQ ID NO: 7104 - RNA, 20 nt, synthetic construct
  source 1..20: mol_type = other RNA
tctccagagccaaaatcaag

SEQ ID NO: 7105 - RNA, 20 nt, synthetic construct
  source 1..20: mol_type = other RNA
tctctatctccagagccaaa

SEQ ID NO: 7106 - RNA, 20 nt, synthetic construct
  source 1..20: mol_type = other RNA
tctggagatagagaatcaaa

SEQ ID NO: 7107 - RNA, 20 nt, synthetic construct
  source 1..20: mol_type = other RNA
tctggaggaaataactagag

SEQ ID NO: 7108 - RNA, 20 nt, synthetic construct
  source 1..20: mol_type = other RNA
tctggagtttcaggttgatt

SEQ ID NO: 7109 - RNA, 20 nt, synthetic construct
  source 1..20: mol_type = other RNA
tctgggtgttctggagtttc

SEQ ID NO: 7110 - RNA, 20 nt, synthetic construct
  source 1..20: mol_type = other RNA
tcttaaagactttgtccata

SEQ ID NO: 7111 - RNA, 20 nt, synthetic construct
  source 1..20: mol_type = other RNA
tcttatggacaaagtcttta

SEQ ID NO: 7112 - RNA, 20 nt, synthetic construct
  source 1..20: mol_type = other RNA
tcttcatttttgacttgtag

SEQ ID NO: 7113 - RNA, 20 nt, synthetic construct
  source 1..20: mol_type = other RNA
tcttctaaatatttcacttt

SEQ ID NO: 7114 - RNA, 20 nt, synthetic construct
  source 1..20: mol_type = other RNA
tcttctaggaggctttcaag

SEQ ID NO: 7115 - RNA, 20 nt, synthetic construct
  source 1..20: mol_type = other RNA
tcttctcagttccttttctt

SEQ ID NO: 7116 - RNA, 20 nt, synthetic construct
  source 1..20: mol_type = other RNA
tcttcttctttgatttcact

SEQ ID NO: 7117 - RNA, 20 nt, synthetic construct
  source 1..20: mol_type = other RNA
tcttctttgatttcactggt

SEQ ID NO: 7118 - RNA, 20 nt, synthetic construct
  source 1..20: mol_type = other RNA
tcttgatcaattctggagga

SEQ ID NO: 7119 - RNA, 20 nt, synthetic construct
  source 1..20: mol_type = other RNA
tcttgattttggctctggag

SEQ ID NO: 7120 - RNA, 20 nt, synthetic construct
  source 1..20: mol_type = other RNA
tctttaagaccatgtcccaa

SEQ ID NO: 7121 - RNA, 20 nt, synthetic construct
  source 1..20: mol_type = other RNA
tctttacctcttcatttttg

SEQ ID NO: 7122 - RNA, 20 nt, synthetic construct
  source 1..20: mol_type = other RNA
tctttattttctacttactt

SEQ ID NO: 7123 - RNA, 20 nt, synthetic construct
  source 1..20: mol_type = other RNA
tctttgatttcactggtttg

SEQ ID NO: 7124 - RNA, 20 nt, synthetic construct
  source 1..20: mol_type = other RNA
tctttttatgatctatcgct

SEQ ID NO: 7125 - RNA, 20 nt, synthetic construct
  source 1..20: mol_type = other RNA
tctttttattgttcctctag

SEQ ID NO: 7126 - RNA, 20 nt, synthetic construct
  source 1..20: mol_type = other RNA
tgaaactccagaacacccag

SEQ ID NO: 7127 - RNA, 20 nt, synthetic construct
  source 1..20: mol_type = other RNA
tgaaagcctcctagaagaaa

SEQ ID NO: 7128 - RNA, 20 nt, synthetic construct
  source 1..20: mol_type = other RNA
tgaaatatgtcattaatttg

SEQ ID NO: 7129 - RNA, 20 nt, synthetic construct
  source 1..20: mol_type = other RNA
tgaaatatttagaagagcaa

SEQ ID NO: 7130 - RNA, 20 nt, synthetic construct
  source 1..20: mol_type = other RNA
tgaaatcaaagaagaagaaa

SEQ ID NO: 7131 - RNA, 20 nt, synthetic construct
  source 1..20: mol_type = other RNA
tgaaccctctttattttcta

SEQ ID NO: 7132 - RNA, 20 nt, synthetic construct
  source 1..20: mol_type = other RNA
tgaactcaactcaaaacttg

SEQ ID NO: 7133 - RNA, 20 nt, synthetic construct
  source 1..20: mol_type = other RNA
tgaagaggtaaagaatatgt

SEQ ID NO: 7134 - RNA, 20 nt, synthetic construct
  source 1..20: mol_type = other RNA
tgaaggaggccattggctaa

SEQ ID NO: 7135 - RNA, 20 nt, synthetic construct
  source 1..20: mol_type = other RNA
tgaagtagaattttttcttc

SEQ ID NO: 7136 - RNA, 20 nt, synthetic construct
  source 1..20: mol_type = other RNA
tgaagttacttctgggtgtt

SEQ ID NO: 7137 - RNA, 20 nt, synthetic construct
  source 1..20: mol_type = other RNA
tgaattaagttagttagttg

SEQ ID NO: 7138 - RNA, 20 nt, synthetic construct
  source 1..20: mol_type = other RNA
tgaattgtcttgatcaattc

SEQ ID NO: 7139 - RNA, 20 nt, synthetic construct
  source 1..20: mol_type = other RNA
tgacatattctttacctctt

SEQ ID NO: 7140 - RNA, 20 nt, synthetic construct
  source 1..20: mol_type = other RNA
tgacatatttcaaaaactca

SEQ ID NO: 7141 - RNA, 20 nt, synthetic construct
  source 1..20: mol_type = other RNA
tgacttgtagtttatatgta

SEQ ID NO: 7142 - RNA, 20 nt, synthetic construct
  source 1..20: mol_type = other RNA
tgagaagaactacatataaa

SEQ ID NO: 7143 - RNA, 20 nt, synthetic construct
  source 1..20: mol_type = other RNA
tgagttcaagtgacatattc

SEQ ID NO: 7144 - RNA, 20 nt, synthetic construct
  source 1..20: mol_type = other RNA
tgagttgagttcaagtgaca

SEQ ID NO: 7145 - RNA, 20 nt, synthetic construct
  source 1..20: mol_type = other RNA
tgagtttttgaaatatgtca

SEQ ID NO: 7146 - RNA, 20 nt, synthetic construct
  source 1..20: mol_type = other RNA
tgatcaaatatgttgagttt

SEQ ID NO: 7147 - RNA, 20 nt, synthetic construct
  source 1..20: mol_type = other RNA
tgatcaagacaattcatcat

SEQ ID NO: 7148 - RNA, 20 nt, synthetic construct
  source 1..20: mol_type = other RNA
tgatcaattctggaggaaat

SEQ ID NO: 7149 - RNA, 20 nt, synthetic construct
  source 1..20: mol_type = other RNA
tgatcagtctttttatgatc

SEQ ID NO: 7150 - RNA, 20 nt, synthetic construct
  source 1..20: mol_type = other RNA
tgatctatcgctgcaaacca

SEQ ID NO: 7151 - RNA, 20 nt, synthetic construct
  source 1..20: mol_type = other RNA
tgatgaattgtcttgatcaa

SEQ ID NO: 7152 - RNA, 20 nt, synthetic construct
  source 1..20: mol_type = other RNA
tgattctctatctccagagc

SEQ ID NO: 7153 - RNA, 20 nt, synthetic construct
  source 1..20: mol_type = other RNA
tgatttcactggtttgcagc

SEQ ID NO: 7154 - RNA, 20 nt, synthetic construct
  source 1..20: mol_type = other RNA
tgattttgaattaagttagt

SEQ ID NO: 7155 - RNA, 20 nt, synthetic construct
  source 1..20: mol_type = other RNA
tgattttggctctggagata

SEQ ID NO: 7156 - RNA, 20 nt, synthetic construct
  source 1..20: mol_type = other RNA
tgcaaaccagtgaaatcaaa

SEQ ID NO: 7157 - RNA, 20 nt, synthetic construct
  source 1..20: mol_type = other RNA
tgcagcgatagatcataaaa

SEQ ID NO: 7158 - RNA, 20 nt, synthetic construct
  source 1..20: mol_type = other RNA
tgctatgttagacgatgtaa

SEQ ID NO: 7159 - RNA, 20 nt, synthetic construct
  source 1..20: mol_type = other RNA
tgctcttctaaatatttcac

SEQ ID NO: 7160 - RNA, 20 nt, synthetic construct
  source 1..20: mol_type = other RNA
tggacaaagtctttaagacc

SEQ ID NO: 7161 - RNA, 20 nt, synthetic construct
  source 1..20: mol_type = other RNA
tggagatagagaatcaaatg

SEQ ID NO: 7162 - RNA, 20 nt, synthetic construct
  source 1..20: mol_type = other RNA
tggaggaaataactagagga

SEQ ID NO: 7163 - RNA, 20 nt, synthetic construct
  source 1..20: mol_type = other RNA
tggagtttcaggttgatttt

SEQ ID NO: 7164 - RNA, 20 nt, synthetic construct
  source 1..20: mol_type = other RNA
tggcccttcgtcttatggac

SEQ ID NO: 7165 - RNA, 20 nt, synthetic construct
  source 1..20: mol_type = other RNA
tggcctccttcagttgggac

SEQ ID NO: 7166 - RNA, 20 nt, synthetic construct
  source 1..20: mol_type = other RNA
tggctaaaatttttacatcg

SEQ ID NO: 7167 - RNA, 20 nt, synthetic construct
  source 1..20: mol_type = other RNA
tggctctggagatagagaat

SEQ ID NO: 7168 - RNA, 20 nt, synthetic construct
  source 1..20: mol_type = other RNA
tgggacatggtcttaaagac

SEQ ID NO: 7169 - RNA, 20 nt, synthetic construct
  source 1..20: mol_type = other RNA
tgggtgttctggagtttcag

SEQ ID NO: 7170 - RNA, 20 nt, synthetic construct
  source 1..20: mol_type = other RNA
tggtcttaaagactttgtcc

SEQ ID NO: 7171 - RNA, 20 nt, synthetic construct
  source 1..20: mol_type = other RNA
tggtttgcagcgatagatca

SEQ ID NO: 7172 - RNA, 20 nt, synthetic construct
  source 1..20: mol_type = other RNA
tgtaaaaattttagccaatg

SEQ ID NO: 7173 - RNA, 20 nt, synthetic construct
  source 1..20: mol_type = other RNA
tgtagttcttctcagttcct

SEQ ID NO: 7174 - RNA, 20 nt, synthetic construct
  source 1..20: mol_type = other RNA
tgtagtttatatgtagttct

SEQ ID NO: 7175 - RNA, 20 nt, synthetic construct
  source 1..20: mol_type = other RNA
tgtcacttgaactcaactca

SEQ ID NO: 7176 - RNA, 20 nt, synthetic construct
  source 1..20: mol_type = other RNA
tgtcattaatttggcccttc

SEQ ID NO: 7177 - RNA, 20 nt, synthetic construct
  source 1..20: mol_type = other RNA
tgtccataagacgaagggcc

SEQ ID NO: 7178 - RNA, 20 nt, synthetic construct
  source 1..20: mol_type = other RNA
tgtcccaactgaaggaggcc

SEQ ID NO: 7179 - RNA, 20 nt, synthetic construct
  source 1..20: mol_type = other RNA
tgtcttgatcaattctggag

SEQ ID NO: 7180 - RNA, 20 nt, synthetic construct
  source 1..20: mol_type = other RNA
tgttagacgatgtaaaaatt

SEQ ID NO: 7181 - RNA, 20 nt, synthetic construct
  source 1..20: mol_type = other RNA
tgttcacaattaagctcctt

SEQ ID NO: 7182 - RNA, 20 nt, synthetic construct
  source 1..20: mol_type = other RNA
tgttcctctagttatttcct

SEQ ID NO: 7183 - RNA, 20 nt, synthetic construct
  source 1..20: mol_type = other RNA
tgttctggagtttcaggttg

SEQ ID NO: 7184 - RNA, 20 nt, synthetic construct
  source 1..20: mol_type = other RNA
tgttgaagtagaattttttc

SEQ ID NO: 7185 - RNA, 20 nt, synthetic construct
  source 1..20: mol_type = other RNA
tgttgagtttttgaaatatg

SEQ ID NO: 7186 - RNA, 20 nt, synthetic construct
  source 1..20: mol_type = other RNA
ttaaagactttgtccataag

SEQ ID NO: 7187 - RNA, 20 nt, synthetic construct
  source 1..20: mol_type = other RNA
ttaagaccatgtcccaactg

SEQ ID NO: 7188 - RNA, 20 nt, synthetic construct
  source 1..20: mol_type = other RNA
ttaagctccttctttttatt

SEQ ID NO: 7189 - RNA, 20 nt, synthetic construct
  source 1..20: mol_type = other RNA
ttaagtgaagttacttctgg

SEQ ID NO: 7190 - RNA, 20 nt, synthetic construct
  source 1..20: mol_type = other RNA
ttaagttagttagttgctct

SEQ ID NO: 7191 - RNA, 20 nt, synthetic construct
  source 1..20: mol_type = other RNA
ttaattcaaaatcaacctga

SEQ ID NO: 7192 - RNA, 20 nt, synthetic construct
  source 1..20: mol_type = other RNA
ttaatttggcccttcgtctt

SEQ ID NO: 7193 - RNA, 20 nt, synthetic construct
  source 1..20: mol_type = other RNA
ttacatcgtctaacatagca

SEQ ID NO: 7194 - RNA, 20 nt, synthetic construct
  source 1..20: mol_type = other RNA
ttacctcttcatttttgact

SEQ ID NO: 7195 - RNA, 20 nt, synthetic construct
  source 1..20: mol_type = other RNA
ttacttctgggtgttctgga

SEQ ID NO: 7196 - RNA, 20 nt, synthetic construct
  source 1..20: mol_type = other RNA
ttactttaagtgaagttact

SEQ ID NO: 7197 - RNA, 20 nt, synthetic construct
  source 1..20: mol_type = other RNA
ttagaagagcaactaactaa

SEQ ID NO: 7198 - RNA, 20 nt, synthetic construct
  source 1..20: mol_type = other RNA
ttagacgatgtaaaaatttt

SEQ ID NO: 7199 - RNA, 20 nt, synthetic construct
  source 1..20: mol_type = other RNA
ttagccaatggcctccttca

SEQ ID NO: 7200 - RNA, 20 nt, synthetic construct
  source 1..20: mol_type = other RNA
ttagttagttgctcttctaa

SEQ ID NO: 7201 - RNA, 20 nt, synthetic construct
  source 1..20: mol_type = other RNA
ttagttgctcttctaaatat

SEQ ID NO: 7202 - RNA, 20 nt, synthetic construct
  source 1..20: mol_type = other RNA
ttatatgtagttcttctcag

SEQ ID NO: 7203 - RNA, 20 nt, synthetic construct
  source 1..20: mol_type = other RNA
ttatgatctatcgctgcaaa

SEQ ID NO: 7204 - RNA, 20 nt, synthetic construct
  source 1..20: mol_type = other RNA
ttatggacaaagtctttaag

SEQ ID NO: 7205 - RNA, 20 nt, synthetic construct
  source 1..20: mol_type = other RNA
ttattgttcctctagttatt

SEQ ID NO: 7206 - RNA, 20 nt, synthetic construct
  source 1..20: mol_type = other RNA
ttatttcctccagaattgat

SEQ ID NO: 7207 - RNA, 20 nt, synthetic construct
  source 1..20: mol_type = other RNA
ttcaaaaactcaacatattt

SEQ ID NO: 7208 - RNA, 20 nt, synthetic construct
  source 1..20: mol_type = other RNA
ttcaaaatcaacctgaaact

SEQ ID NO: 7209 - RNA, 20 nt, synthetic construct
  source 1..20: mol_type = other RNA
ttcaacaaaaagtgaaatat

SEQ ID NO: 7210 - RNA, 20 nt, synthetic construct
  source 1..20: mol_type = other RNA
ttcaagtgacatattcttta

SEQ ID NO: 7211 - RNA, 20 nt, synthetic construct
  source 1..20: mol_type = other RNA
ttcaagttttgagttgagtt

SEQ ID NO: 7212 - RNA, 20 nt, synthetic construct
  source 1..20: mol_type = other RNA
ttcacaattaagctccttct

SEQ ID NO: 7213 - RNA, 20 nt, synthetic construct
  source 1..20: mol_type = other RNA
ttcactggtttgcagcgata

SEQ ID NO: 7214 - RNA, 20 nt, synthetic construct
  source 1..20: mol_type = other RNA
ttcacttaaagtaagtagaa

SEQ ID NO: 7215 - RNA, 20 nt, synthetic construct
  source 1..20: mol_type = other RNA
ttcactttttgttgaagtag

SEQ ID NO: 7216 - RNA, 20 nt, synthetic construct
  source 1..20: mol_type = other RNA
ttcaggttgattttgaatta

SEQ ID NO: 7217 - RNA, 20 nt, synthetic construct
  source 1..20: mol_type = other RNA
ttcagttgggacatggtctt

SEQ ID NO: 7218 - RNA, 20 nt, synthetic construct
  source 1..20: mol_type = other RNA
ttcatcatttgattctctat

SEQ ID NO: 7219 - RNA, 20 nt, synthetic construct
  source 1..20: mol_type = other RNA
ttcatttttgacttgtagtt

SEQ ID NO: 7220 - RNA, 20 nt, synthetic construct
  source 1..20: mol_type = other RNA
ttcctccagaattgatcaag

SEQ ID NO: 7221 - RNA, 20 nt, synthetic construct
  source 1..20: mol_type = other RNA
ttcctctagttatttcctcc

SEQ ID NO: 7222 - RNA, 20 nt, synthetic construct
  source 1..20: mol_type = other RNA
ttccttttcttcttctttga

SEQ ID NO: 7223 - RNA, 20 nt, synthetic construct
  source 1..20: mol_type = other RNA
ttcgtcttatggacaaagtc

SEQ ID NO: 7224 - RNA, 20 nt, synthetic construct
  source 1..20: mol_type = other RNA
ttctacttactttaagtgaa

SEQ ID NO: 7225 - RNA, 20 nt, synthetic construct
  source 1..20: mol_type = other RNA
ttctacttcaacaaaaagtg

SEQ ID NO: 7226 - RNA, 20 nt, synthetic construct
  source 1..20: mol_type = other RNA
ttctaggaggctttcaagtt

SEQ ID NO: 7227 - RNA, 20 nt, synthetic construct
  source 1..20: mol_type = other RNA
ttctcagttccttttcttct

SEQ ID NO: 7228 - RNA, 20 nt, synthetic construct
  source 1..20: mol_type = other RNA
ttctctatctccagagccaa

SEQ ID NO: 7229 - RNA, 20 nt, synthetic construct
  source 1..20: mol_type = other RNA
ttctggaggaaataactaga

SEQ ID NO: 7230 - RNA, 20 nt, synthetic construct
  source 1..20: mol_type = other RNA
ttctggagtttcaggttgat

SEQ ID NO: 7231 - RNA, 20 nt, synthetic construct
  source 1..20: mol_type = other RNA
ttctgggtgttctggagttt

SEQ ID NO: 7232 - RNA, 20 nt, synthetic construct
  source 1..20: mol_type = other RNA
ttcttctaggaggctttcaa

SEQ ID NO: 7233 - RNA, 20 nt, synthetic construct
  source 1..20: mol_type = other RNA
ttcttctcagttccttttct

SEQ ID NO: 7234 - RNA, 20 nt, synthetic construct
  source 1..20: mol_type = other RNA
ttcttcttctttgatttcac

SEQ ID NO: 7235 - RNA, 20 nt, synthetic construct
  source 1..20: mol_type = other RNA
ttcttctttgatttcactgg

SEQ ID NO: 7236 - RNA, 20 nt, synthetic construct
  source 1..20: mol_type = other RNA
ttctttacctcttcattttt

SEQ ID NO: 7237 - RNA, 20 nt, synthetic construct
  source 1..20: mol_type = other RNA
ttctttgatttcactggttt

SEQ ID NO: 7238 - RNA, 20 nt, synthetic construct
  source 1..20: mol_type = other RNA
ttctttttattgttcctcta

SEQ ID NO: 7239 - RNA, 20 nt, synthetic construct
  source 1..20: mol_type = other RNA
ttgaaagcctcctagaagaa

SEQ ID NO: 7240 - RNA, 20 nt, synthetic construct
  source 1..20: mol_type = other RNA
ttgaactcaactcaaaactt

SEQ ID NO: 7241 - RNA, 20 nt, synthetic construct
  source 1..20: mol_type = other RNA
ttgaagtagaattttttctt

SEQ ID NO: 7242 - RNA, 20 nt, synthetic construct
  source 1..20: mol_type = other RNA
ttgaattaagttagttagtt

SEQ ID NO: 7243 - RNA, 20 nt, synthetic construct
  source 1..20: mol_type = other RNA
ttgacttgtagtttatatgt

SEQ ID NO: 7244 - RNA, 20 nt, synthetic construct
  source 1..20: mol_type = other RNA
ttgagttcaagtgacatatt

SEQ ID NO: 7245 - RNA, 20 nt, synthetic construct
  source 1..20: mol_type = other RNA
ttgagttgagttcaagtgac

SEQ ID NO: 7246 - RNA, 20 nt, synthetic construct
  source 1..20: mol_type = other RNA
ttgagtttttgaaatatgtc

SEQ ID NO: 7247 - RNA, 20 nt, synthetic construct
  source 1..20: mol_type = other RNA
ttgatcaagacaattcatca

SEQ ID NO: 7248 - RNA, 20 nt, synthetic construct
  source 1..20: mol_type = other RNA
ttgatcaattctggaggaaa

SEQ ID NO: 7249 - RNA, 20 nt, synthetic construct
  source 1..20: mol_type = other RNA
ttgatcagtctttttatgat

SEQ ID NO: 7250 - RNA, 20 nt, synthetic construct
  source 1..20: mol_type = other RNA
ttgattctctatctccagag

SEQ ID NO: 7251 - RNA, 20 nt, synthetic construct
  source 1..20: mol_type = other RNA
ttgatttcactggtttgcag

SEQ ID NO: 7252 - RNA, 20 nt, synthetic construct
  source 1..20: mol_type = other RNA
ttgattttgaattaagttag

SEQ ID NO: 7253 - RNA, 20 nt, synthetic construct
  source 1..20: mol_type = other RNA
ttgattttggctctggagat

SEQ ID NO: 7254 - RNA, 20 nt, synthetic construct
  source 1..20: mol_type = other RNA
ttgcagcgatagatcataaa

SEQ ID NO: 7255 - RNA, 20 nt, synthetic construct
  source 1..20: mol_type = other RNA
ttgctatgttagacgatgta

SEQ ID NO: 7256 - RNA, 20 nt, synthetic construct
  source 1..20: mol_type = other RNA
ttgctcttctaaatatttca

SEQ ID NO: 7257 - RNA, 20 nt, synthetic construct
  source 1..20: mol_type = other RNA
ttggcccttcgtcttatgga

SEQ ID NO: 7258 - RNA, 20 nt, synthetic construct
  source 1..20: mol_type = other RNA
ttggctaaaatttttacatc

SEQ ID NO: 7259 - RNA, 20 nt, synthetic construct
  source 1..20: mol_type = other RNA
ttggctctggagatagagaa

SEQ ID NO: 7260 - RNA, 20 nt, synthetic construct
  source 1..20: mol_type = other RNA
ttgggacatggtcttaaaga

SEQ ID NO: 7261 - RNA, 20 nt, synthetic construct
  source 1..20: mol_type = other RNA
ttgtagtttatatgtagttc

SEQ ID NO: 7262 - RNA, 20 nt, synthetic construct
  source 1..20: mol_type = other RNA
ttgtccataagacgaagggc

SEQ ID NO: 7263 - RNA, 20 nt, synthetic construct
  source 1..20: mol_type = other RNA
ttgtcttgatcaattctgga

SEQ ID NO: 7264 - RNA, 20 nt, synthetic construct
  source 1..20: mol_type = other RNA
ttgttcctctagttatttcc

SEQ ID NO: 7265 - RNA, 20 nt, synthetic construct
  source 1..20: mol_type = other RNA
ttgttgaagtagaatttttt

SEQ ID NO: 7266 - RNA, 20 nt, synthetic construct
  source 1..20: mol_type = other RNA
tttaagaccatgtcccaact

SEQ ID NO: 7267 - RNA, 20 nt, synthetic construct
  source 1..20: mol_type = other RNA
tttaagtgaagttacttctg

SEQ ID NO: 7268 - RNA, 20 nt, synthetic construct
  source 1..20: mol_type = other RNA
tttacatcgtctaacatagc

SEQ ID NO: 7269 - RNA, 20 nt, synthetic construct
  source 1..20: mol_type = other RNA
tttacctcttcatttttgac

SEQ ID NO: 7270 - RNA, 20 nt, synthetic construct
  source 1..20: mol_type = other RNA
tttagaagagcaactaacta

SEQ ID NO: 7271 - RNA, 20 nt, synthetic construct
  source 1..20: mol_type = other RNA
tttagccaatggcctccttc

SEQ ID NO: 7272 - RNA, 20 nt, synthetic construct
  source 1..20: mol_type = other RNA
tttatatgtagttcttctca

SEQ ID NO: 7273 - RNA, 20 nt, synthetic construct
  source 1..20: mol_type = other RNA
tttatgatctatcgctgcaa

SEQ ID NO: 7274 - RNA, 20 nt, synthetic construct
  source 1..20: mol_type = other RNA
tttattgttcctctagttat

SEQ ID NO: 7275 - RNA, 20 nt, synthetic construct
  source 1..20: mol_type = other RNA
tttcaaaaactcaacatatt

SEQ ID NO: 7276 - RNA, 20 nt, synthetic construct
  source 1..20: mol_type = other RNA
tttcaagttttgagttgagt

SEQ ID NO: 7277 - RNA, 20 nt, synthetic construct
  source 1..20: mol_type = other RNA
tttcactggtttgcagcgat

SEQ ID NO: 7278 - RNA, 20 nt, synthetic construct
  source 1..20: mol_type = other RNA
tttcactttttgttgaagta

SEQ ID NO: 7279 - RNA, 20 nt, synthetic construct
  source 1..20: mol_type = other RNA
tttcaggttgattttgaatt

SEQ ID NO: 7280 - RNA, 20 nt, synthetic construct
  source 1..20: mol_type = other RNA
tttcctccagaattgatcaa

SEQ ID NO: 7281 - RNA, 20 nt, synthetic construct
  source 1..20: mol_type = other RNA
tttctacttactttaagtga

SEQ ID NO: 7282 - RNA, 20 nt, synthetic construct
  source 1..20: mol_type = other RNA
tttcttctaggaggctttca

SEQ ID NO: 7283 - RNA, 20 nt, synthetic construct
  source 1..20: mol_type = other RNA
tttcttcttctttgatttca

SEQ ID NO: 7284 - RNA, 20 nt, synthetic construct
  source 1..20: mol_type = other RNA
tttgaattaagttagttagt

SEQ ID NO: 7285 - RNA, 20 nt, synthetic construct
  source 1..20: mol_type = other RNA
tttgacttgtagtttatatg

SEQ ID NO: 7286 - RNA, 20 nt, synthetic construct
  source 1..20: mol_type = other RNA
tttgagttgagttcaagtga

SEQ ID NO: 7287 - RNA, 20 nt, synthetic construct
  source 1..20: mol_type = other RNA
tttgatcagtctttttatga

SEQ ID NO: 7288 - RNA, 20 nt, synthetic construct
  source 1..20: mol_type = other RNA
tttgattctctatctccaga

SEQ ID NO: 7289 - RNA, 20 nt, synthetic construct
  source 1..20: mol_type = other RNA
tttgatttcactggtttgca

SEQ ID NO: 7290 - RNA, 20 nt, synthetic construct
  source 1..20: mol_type = other RNA
tttgcagcgatagatcataa

SEQ ID NO: 7291 - RNA, 20 nt, synthetic construct
  source 1..20: mol_type = other RNA
tttgctatgttagacgatgt

SEQ ID NO: 7292 - RNA, 20 nt, synthetic construct
  source 1..20: mol_type = other RNA
tttggcccttcgtcttatgg

SEQ ID NO: 7293 - RNA, 20 nt, synthetic construct
  source 1..20: mol_type = other RNA
tttggctctggagatagaga

SEQ ID NO: 7294 - RNA, 20 nt, synthetic construct
  source 1..20: mol_type = other RNA
tttgtccataagacgaaggg

SEQ ID NO: 7295 - RNA, 20 nt, synthetic construct
  source 1..20: mol_type = other RNA
tttgttgaagtagaattttt

SEQ ID NO: 7296 - RNA, 20 nt, synthetic construct
  source 1..20: mol_type = other RNA
ttttacatcgtctaacatag

SEQ ID NO: 7297 - RNA, 20 nt, synthetic construct
  source 1..20: mol_type = other RNA
ttttagccaatggcctcctt

SEQ ID NO: 7298 - RNA, 20 nt, synthetic construct
  source 1..20: mol_type = other RNA
ttttatgatctatcgctgca

SEQ ID NO: 7299 - RNA, 20 nt, synthetic construct
  source 1..20: mol_type = other RNA
ttttattgttcctctagtta

SEQ ID NO: 7300 - RNA, 20 nt, synthetic construct
  source 1..20: mol_type = other RNA
ttttctacttactttaagtg

SEQ ID NO: 7301 - RNA, 20 nt, synthetic construct
  source 1..20: mol_type = other RNA
ttttcttctaggaggctttc

SEQ ID NO: 7302 - RNA, 20 nt, synthetic construct
  source 1..20: mol_type = other RNA
ttttcttcttctttgatttc

SEQ ID NO: 7303 - RNA, 20 nt, synthetic construct
  source 1..20: mol_type = other RNA
ttttgaattaagttagttag

SEQ ID NO: 7304 - RNA, 20 nt, synthetic construct
  source 1..20: mol_type = other RNA
ttttgacttgtagtttatat

SEQ ID NO: 7305 - RNA, 20 nt, synthetic construct
  source 1..20: mol_type = other RNA
ttttgagttgagttcaagtg

SEQ ID NO: 7306 - RNA, 20 nt, synthetic construct
  source 1..20: mol_type = other RNA
ttttggctctggagatagag

SEQ ID NO: 7307 - RNA, 20 nt, synthetic construct
  source 1..20: mol_type = other RNA
ttttgttgaagtagaatttt

SEQ ID NO: 7308 - RNA, 20 nt, synthetic construct
  source 1..20: mol_type = other RNA
tttttacatcgtctaacata

SEQ ID NO: 7309 - RNA, 20 nt, synthetic construct
  source 1..20: mol_type = other RNA
tttttatgatctatcgctgc

SEQ ID NO: 7310 - RNA, 20 nt, synthetic construct
  source 1..20: mol_type = other RNA
tttttattgttcctctagtt

SEQ ID NO: 7311 - RNA, 20 nt, synthetic construct
  source 1..20: mol_type = other RNA
tttttcttctaggaggcttt

SEQ ID NO: 7312 - RNA, 20 nt, synthetic construct
  source 1..20: mol_type = other RNA
tttttgacttgtagtttata

SEQ ID NO: 7313 - RNA, 20 nt, synthetic construct
  source 1..20: mol_type = other RNA
tttttgttgaagtagaattt

SEQ ID NO: 7314 - RNA, 20 nt, synthetic construct
  source 1..20: mol_type = other RNA
ttttttcttctaggaggctt

SEQ ID NO: 7315 - RNA, 21 nt, synthetic construct
  source 1..21: mol_type = other RNA
aaaaactcaacatatttgatc

SEQ ID NO: 7316 - RNA, 21 nt, synthetic construct
  source 1..21: mol_type = other RNA
aaaaagaaggagcttaattgt

SEQ ID NO: 7317 - RNA, 21 nt, synthetic construct
  source 1..21: mol_type = other RNA
aaaaagactgatcaaatatgt

SEQ ID NO: 7318 - RNA, 21 nt, synthetic construct
  source 1..21: mol_type = other RNA
aaaaatgaagaggtaaagaat

SEQ ID NO: 7319 - RNA, 21 nt, synthetic construct
  source 1..21: mol_type = other RNA
aaaaattttagccaatggcct

SEQ ID NO: 7320 - RNA, 21 nt, synthetic construct
  source 1..21: mol_type = other RNA
aaaactcaacatatttgatca

SEQ ID NO: 7321 - RNA, 21 nt, synthetic construct
  source 1..21: mol_type = other RNA
aaaacttgaaagcctcctaga

SEQ ID NO: 7322 - RNA, 21 nt, synthetic construct
  source 1..21: mol_type = other RNA
aaaagactgatcaaatatgtt

SEQ ID NO: 7323 - RNA, 21 nt, synthetic construct
  source 1..21: mol_type = other RNA
aaaaggaactgagaagaacta

SEQ ID NO: 7324 - RNA, 21 nt, synthetic construct
  source 1..21: mol_type = other RNA
aaaatcaacctgaaactccag

SEQ ID NO: 7325 - RNA, 21 nt, synthetic construct
  source 1..21: mol_type = other RNA
aaaatcaagatttgctatgtt

SEQ ID NO: 7326 - RNA, 21 nt, synthetic construct
  source 1..21: mol_type = other RNA
aaaatgaagaggtaaagaata

SEQ ID NO: 7327 - RNA, 21 nt, synthetic construct
  source 1..21: mol_type = other RNA
aaaattttagccaatggcctc

SEQ ID NO: 7328 - RNA, 21 nt, synthetic construct
  source 1..21: mol_type = other RNA
aaaatttttacatcgtctaac

SEQ ID NO: 7329 - RNA, 21 nt, synthetic construct
  source 1..21: mol_type = other RNA
aaacatgaaccctctttattt

SEQ ID NO: 7330 - RNA, 21 nt, synthetic construct
  source 1..21: mol_type = other RNA
aaaccagtgaaatcaaagaag

SEQ ID NO: 7331 - RNA, 21 nt, synthetic construct
  source 1..21: mol_type = other RNA
aaactacaagtcaaaaatgaa

SEQ ID NO: 7332 - RNA, 21 nt, synthetic construct
  source 1..21: mol_type = other RNA
aaactcaacatatttgatcag

SEQ ID NO: 7333 - RNA, 21 nt, synthetic construct
  source 1..21: mol_type = other RNA
aaactccagaacacccagaag

SEQ ID NO: 7334 - RNA, 21 nt, synthetic construct
  source 1..21: mol_type = other RNA
aaacttgaaagcctcctagaa

SEQ ID NO: 7335 - RNA, 21 nt, synthetic construct
  source 1..21: mol_type = other RNA
aaagaagaagaaaaggaactg

SEQ ID NO: 7336 - RNA, 21 nt, synthetic construct
  source 1..21: mol_type = other RNA
aaagaatatgtcacttgaact

SEQ ID NO: 7337 - RNA, 21 nt, synthetic construct
  source 1..21: mol_type = other RNA
aaagactgatcaaatatgttg

SEQ ID NO: 7338 - RNA, 21 nt, synthetic construct
  source 1..21: mol_type = other RNA
aaagactttgtccataagacg

SEQ ID NO: 7339 - RNA, 21 nt, synthetic construct
  source 1..21: mol_type = other RNA
aaagcctcctagaagaaaaaa

SEQ ID NO: 7340 - RNA, 21 nt, synthetic construct
  source 1..21: mol_type = other RNA
aaaggaactgagaagaactac

SEQ ID NO: 7341 - RNA, 21 nt, synthetic construct
  source 1..21: mol_type = other RNA
aaagtctttaagaccatgtcc

SEQ ID NO: 7342 - RNA, 21 nt, synthetic construct
  source 1..21: mol_type = other RNA
aaagtgaaatatttagaagag

SEQ ID NO: 7343 - RNA, 21 nt, synthetic construct
  source 1..21: mol_type = other RNA
aaataactagaggaacaataa

SEQ ID NO: 7344 - RNA, 21 nt, synthetic construct
  source 1..21: mol_type = other RNA
aaatatgtcattaatttggcc

SEQ ID NO: 7345 - RNA, 21 nt, synthetic construct
  source 1..21: mol_type = other RNA
aaatatttagaagagcaacta

SEQ ID NO: 7346 - RNA, 21 nt, synthetic construct
  source 1..21: mol_type = other RNA
aaatcaaagaagaagaaaagg

SEQ ID NO: 7347 - RNA, 21 nt, synthetic construct
  source 1..21: mol_type = other RNA
aaatcaacctgaaactccaga

SEQ ID NO: 7348 - RNA, 21 nt, synthetic construct
  source 1..21: mol_type = other RNA
aaatcaagatttgctatgtta

SEQ ID NO: 7349 - RNA, 21 nt, synthetic construct
  source 1..21: mol_type = other RNA
aaatcttgattttggctctgg

SEQ ID NO: 7350 - RNA, 21 nt, synthetic construct
  source 1..21: mol_type = other RNA
aaatgaagaggtaaagaatat

SEQ ID NO: 7351 - RNA, 21 nt, synthetic construct
  source 1..21: mol_type = other RNA
aaatgatgaattgtcttgatc

SEQ ID NO: 7352 - RNA, 21 nt, synthetic construct
  source 1..21: mol_type = other RNA
aaatgttcacaattaagctcc

SEQ ID NO: 7353 - RNA, 21 nt, synthetic construct
  source 1..21: mol_type = other RNA
aaattctacttcaacaaaaag

SEQ ID NO: 7354 - RNA, 21 nt, synthetic construct
  source 1..21: mol_type = other RNA
aaattttagccaatggcctcc

SEQ ID NO: 7355 - RNA, 21 nt, synthetic construct
  source 1..21: mol_type = other RNA
aaatttttacatcgtctaaca

SEQ ID NO: 7356 - RNA, 21 nt, synthetic construct
  source 1..21: mol_type = other RNA
aacaataaaaagaaggagctt

SEQ ID NO: 7357 - RNA, 21 nt, synthetic construct
  source 1..21: mol_type = other RNA
aacacccagaagtaacttcac

SEQ ID NO: 7358 - RNA, 21 nt, synthetic construct
  source 1..21: mol_type = other RNA
aacatagcaaatcttgatttt

SEQ ID NO: 7359 - RNA, 21 nt, synthetic construct
  source 1..21: mol_type = other RNA
aacatatttgatcagtctttt

SEQ ID NO: 7360 - RNA, 21 nt, synthetic construct
  source 1..21: mol_type = other RNA
aacatgaaccctctttatttt

SEQ ID NO: 7361 - RNA, 21 nt, synthetic construct
  source 1..21: mol_type = other RNA
aaccagtgaaatcaaagaaga

SEQ ID NO: 7362 - RNA, 21 nt, synthetic construct
  source 1..21: mol_type = other RNA
aaccctctttattttctactt

SEQ ID NO: 7363 - RNA, 21 nt, synthetic construct
  source 1..21: mol_type = other RNA
aacctgaaactccagaacacc

SEQ ID NO: 7364 - RNA, 21 nt, synthetic construct
  source 1..21: mol_type = other RNA
aactacaagtcaaaaatgaag

SEQ ID NO: 7365 - RNA, 21 nt, synthetic construct
  source 1..21: mol_type = other RNA
aactacatataaactacaagt

SEQ ID NO: 7366 - RNA, 21 nt, synthetic construct
  source 1..21: mol_type = other RNA
aactagaggaacaataaaaag

SEQ ID NO: 7367 - RNA, 21 nt, synthetic construct
  source 1..21: mol_type = other RNA
aactcaaaacttgaaagcctc

SEQ ID NO: 7368 - RNA, 21 nt, synthetic construct
  source 1..21: mol_type = other RNA
aactcaacatatttgatcagt

SEQ ID NO: 7369 - RNA, 21 nt, synthetic construct
  source 1..21: mol_type = other RNA
aactcaactcaaaacttgaaa

SEQ ID NO: 7370 - RNA, 21 nt, synthetic construct
  source 1..21: mol_type = other RNA
aactccagaacacccagaagt

SEQ ID NO: 7371 - RNA, 21 nt, synthetic construct
  source 1..21: mol_type = other RNA
aactgaaggaggccattggct

SEQ ID NO: 7372 - RNA, 21 nt, synthetic construct
  source 1..21: mol_type = other RNA
aactgagaagaactacatata

SEQ ID NO: 7373 - RNA, 21 nt, synthetic construct
  source 1..21: mol_type = other RNA
aacttaattcaaaatcaacct

SEQ ID NO: 7374 - RNA, 21 nt, synthetic construct
  source 1..21: mol_type = other RNA
aacttcacttaaagtaagtag

SEQ ID NO: 7375 - RNA, 21 nt, synthetic construct
  source 1..21: mol_type = other RNA
aacttgaaagcctcctagaag

SEQ ID NO: 7376 - RNA, 21 nt, synthetic construct
  source 1..21: mol_type = other RNA
aagaaaaaattctacttcaac

SEQ ID NO: 7377 - RNA, 21 nt, synthetic construct
  source 1..21: mol_type = other RNA
aagaaaaggaactgagaagaa

SEQ ID NO: 7378 - RNA, 21 nt, synthetic construct
  source 1..21: mol_type = other RNA
aagaactacatataaactaca

SEQ ID NO: 7379 - RNA, 21 nt, synthetic construct
  source 1..21: mol_type = other RNA
aagaagaaaaggaactgagaa

SEQ ID NO: 7380 - RNA, 21 nt, synthetic construct
  source 1..21: mol_type = other RNA
aagaagaagaaaaggaactga

SEQ ID NO: 7381 - RNA, 21 nt, synthetic construct
  source 1..21: mol_type = other RNA
aagaatatgtcacttgaactc

SEQ ID NO: 7382 - RNA, 21 nt, synthetic construct
  source 1..21: mol_type = other RNA
aagacaattcatcatttgatt

SEQ ID NO: 7383 - RNA, 21 nt, synthetic construct
  source 1..21: mol_type = other RNA
aagaccatgtcccaactgaag

SEQ ID NO: 7384 - RNA, 21 nt, synthetic construct
  source 1..21: mol_type = other RNA
aagacgaagggccaaattaat

SEQ ID NO: 7385 - RNA, 21 nt, synthetic construct
  source 1..21: mol_type = other RNA
aagactgatcaaatatgttga

SEQ ID NO: 7386 - RNA, 21 nt, synthetic construct
  source 1..21: mol_type = other RNA
aagactttgtccataagacga

SEQ ID NO: 7387 - RNA, 21 nt, synthetic construct
  source 1..21: mol_type = other RNA
aagagcaactaactaacttaa

SEQ ID NO: 7388 - RNA, 21 nt, synthetic construct
  source 1..21: mol_type = other RNA
aagaggtaaagaatatgtcac

SEQ ID NO: 7389 - RNA, 21 nt, synthetic construct
  source 1..21: mol_type = other RNA
aagatttgctatgttagacga

SEQ ID NO: 7390 - RNA, 21 nt, synthetic construct
  source 1..21: mol_type = other RNA
aagcctcctagaagaaaaaat

SEQ ID NO: 7391 - RNA, 21 nt, synthetic construct
  source 1..21: mol_type = other RNA
aagctccttctttttattgtt

SEQ ID NO: 7392 - RNA, 21 nt, synthetic construct
  source 1..21: mol_type = other RNA
aaggaactgagaagaactaca

SEQ ID NO: 7393 - RNA, 21 nt, synthetic construct
  source 1..21: mol_type = other RNA
aaggaggccattggctaaaat

SEQ ID NO: 7394 - RNA, 21 nt, synthetic construct
  source 1..21: mol_type = other RNA
aagggccaaattaatgacata

SEQ ID NO: 7395 - RNA, 21 nt, synthetic construct
  source 1..21: mol_type = other RNA
aagtaacttcacttaaagtaa

SEQ ID NO: 7396 - RNA, 21 nt, synthetic construct
  source 1..21: mol_type = other RNA
aagtaagtagaaaataaagag

SEQ ID NO: 7397 - RNA, 21 nt, synthetic construct
  source 1..21: mol_type = other RNA
aagtagaattttttcttctag

SEQ ID NO: 7398 - RNA, 21 nt, synthetic construct
  source 1..21: mol_type = other RNA
aagtcaaaaatgaagaggtaa

SEQ ID NO: 7399 - RNA, 21 nt, synthetic construct
  source 1..21: mol_type = other RNA
aagtctttaagaccatgtccc

SEQ ID NO: 7400 - RNA, 21 nt, synthetic construct
  source 1..21: mol_type = other RNA
aagtgaaatatttagaagagc

SEQ ID NO: 7401 - RNA, 21 nt, synthetic construct
  source 1..21: mol_type = other RNA
aagtgaagttacttctgggtg

SEQ ID NO: 7402 - RNA, 21 nt, synthetic construct
  source 1..21: mol_type = other RNA
aagtgacatattctttacctc

SEQ ID NO: 7403 - RNA, 21 nt, synthetic construct
  source 1..21: mol_type = other RNA
aagttacttctgggtgttctg

SEQ ID NO: 7404 - RNA, 21 nt, synthetic construct
  source 1..21: mol_type = other RNA
aagttagttagttgctcttct

SEQ ID NO: 7405 - RNA, 21 nt, synthetic construct
  source 1..21: mol_type = other RNA
aagttttgagttgagttcaag

SEQ ID NO: 7406 - RNA, 21 nt, synthetic construct
  source 1..21: mol_type = other RNA
aataaaaagaaggagcttaat

SEQ ID NO: 7407 - RNA, 21 nt, synthetic construct
  source 1..21: mol_type = other RNA
aataactagaggaacaataaa

SEQ ID NO: 7408 - RNA, 21 nt, synthetic construct
  source 1..21: mol_type = other RNA
aatatgtcacttgaactcaac

SEQ ID NO: 7409 - RNA, 21 nt, synthetic construct
  source 1..21: mol_type = other RNA
aatatgtcattaatttggccc

SEQ ID NO: 7410 - RNA, 21 nt, synthetic construct
  source 1..21: mol_type = other RNA
aatatttagaagagcaactaa

SEQ ID NO: 7411 - RNA, 21 nt, synthetic construct
  source 1..21: mol_type = other RNA
aatcaaagaagaagaaaagga

SEQ ID NO: 7412 - RNA, 21 nt, synthetic construct
  source 1..21: mol_type = other RNA
aatcaaatgatgaattgtctt

SEQ ID NO: 7413 - RNA, 21 nt, synthetic construct
  source 1..21: mol_type = other RNA
aatcaacctgaaactccagaa

SEQ ID NO: 7414 - RNA, 21 nt, synthetic construct
  source 1..21: mol_type = other RNA
aatcaagatttgctatgttag

SEQ ID NO: 7415 - RNA, 21 nt, synthetic construct
  source 1..21: mol_type = other RNA
aatcttgattttggctctgga

SEQ ID NO: 7416 - RNA, 21 nt, synthetic construct
  source 1..21: mol_type = other RNA
aatgaagaggtaaagaatatg

SEQ ID NO: 7417 - RNA, 21 nt, synthetic construct
  source 1..21: mol_type = other RNA
aatgacatatttcaaaaactc

SEQ ID NO: 7418 - RNA, 21 nt, synthetic construct
  source 1..21: mol_type = other RNA
aatgatgaattgtcttgatca

SEQ ID NO: 7419 - RNA, 21 nt, synthetic construct
  source 1..21: mol_type = other RNA
aatggcctccttcagttggga

SEQ ID NO: 7420 - RNA, 21 nt, synthetic construct
  source 1..21: mol_type = other RNA
aatgttcacaattaagctcct

SEQ ID NO: 7421 - RNA, 21 nt, synthetic construct
  source 1..21: mol_type = other RNA
aattaagctccttctttttat

SEQ ID NO: 7422 - RNA, 21 nt, synthetic construct
  source 1..21: mol_type = other RNA
aattaagttagttagttgctc

SEQ ID NO: 7423 - RNA, 21 nt, synthetic construct
  source 1..21: mol_type = other RNA
aattcaaaatcaacctgaaac

SEQ ID NO: 7424 - RNA, 21 nt, synthetic construct
  source 1..21: mol_type = other RNA
aattcatcatttgattctcta

SEQ ID NO: 7425 - RNA, 21 nt, synthetic construct
  source 1..21: mol_type = other RNA
aattctacttcaacaaaaagt

SEQ ID NO: 7426 - RNA, 21 nt, synthetic construct
  source 1..21: mol_type = other RNA
aattctggaggaaataactag

SEQ ID NO: 7427 - RNA, 21 nt, synthetic construct
  source 1..21: mol_type = other RNA
aattgatcaagacaattcatc

SEQ ID NO: 7428 - RNA, 21 nt, synthetic construct
  source 1..21: mol_type = other RNA
aattgtcttgatcaattctgg

SEQ ID NO: 7429 - RNA, 21 nt, synthetic construct
  source 1..21: mol_type = other RNA
aatttggcccttcgtcttatg

SEQ ID NO: 7430 - RNA, 21 nt, synthetic construct
  source 1..21: mol_type = other RNA
aattttagccaatggcctcct

SEQ ID NO: 7431 - RNA, 21 nt, synthetic construct
  source 1..21: mol_type = other RNA
aatttttacatcgtctaacat

SEQ ID NO: 7432 - RNA, 21 nt, synthetic construct
  source 1..21: mol_type = other RNA
aattttttcttctaggaggct

SEQ ID NO: 7433 - RNA, 21 nt, synthetic construct
  source 1..21: mol_type = other RNA
acaaagtctttaagaccatgt

SEQ ID NO: 7434 - RNA, 21 nt, synthetic construct
  source 1..21: mol_type = other RNA
acaagtcaaaaatgaagaggt

SEQ ID NO: 7435 - RNA, 21 nt, synthetic construct
  source 1..21: mol_type = other RNA
acaataaaaagaaggagctta

SEQ ID NO: 7436 - RNA, 21 nt, synthetic construct
  source 1..21: mol_type = other RNA
acaattaagctccttcttttt

SEQ ID NO: 7437 - RNA, 21 nt, synthetic construct
  source 1..21: mol_type = other RNA
acaattcatcatttgattctc

SEQ ID NO: 7438 - RNA, 21 nt, synthetic construct
  source 1..21: mol_type = other RNA
acacccagaagtaacttcact

SEQ ID NO: 7439 - RNA, 21 nt, synthetic construct
  source 1..21: mol_type = other RNA
acatagcaaatcttgattttg

SEQ ID NO: 7440 - RNA, 21 nt, synthetic construct
  source 1..21: mol_type = other RNA
acatataaactacaagtcaaa

SEQ ID NO: 7441 - RNA, 21 nt, synthetic construct
  source 1..21: mol_type = other RNA
acatattctttacctcttcat

SEQ ID NO: 7442 - RNA, 21 nt, synthetic construct
  source 1..21: mol_type = other RNA
acatatttcaaaaactcaaca

SEQ ID NO: 7443 - RNA, 21 nt, synthetic construct
  source 1..21: mol_type = other RNA
acatatttgatcagtcttttt

SEQ ID NO: 7444 - RNA, 21 nt, synthetic construct
  source 1..21: mol_type = other RNA
acatcgtctaacatagcaaat

SEQ ID NO: 7445 - RNA, 21 nt, synthetic construct
  source 1..21: mol_type = other RNA
acatgaaccctctttattttc

SEQ ID NO: 7446 - RNA, 21 nt, synthetic construct
  source 1..21: mol_type = other RNA
acatggtcttaaagactttgt

SEQ ID NO: 7447 - RNA, 21 nt, synthetic construct
  source 1..21: mol_type = other RNA
accagtgaaatcaaagaagaa

SEQ ID NO: 7448 - RNA, 21 nt, synthetic construct
  source 1..21: mol_type = other RNA
accatgtcccaactgaaggag

SEQ ID NO: 7449 - RNA, 21 nt, synthetic construct
  source 1..21: mol_type = other RNA
acccagaagtaacttcactta

SEQ ID NO: 7450 - RNA, 21 nt, synthetic construct
  source 1..21: mol_type = other RNA
accctctttattttctactta

SEQ ID NO: 7451 - RNA, 21 nt, synthetic construct
  source 1..21: mol_type = other RNA
acctcttcatttttgacttgt

SEQ ID NO: 7452 - RNA, 21 nt, synthetic construct
  source 1..21: mol_type = other RNA
acctgaaactccagaacaccc

SEQ ID NO: 7453 - RNA, 21 nt, synthetic construct
  source 1..21: mol_type = other RNA
acgaagggccaaattaatgac

SEQ ID NO: 7454 - RNA, 21 nt, synthetic construct
  source 1..21: mol_type = other RNA
acgatgtaaaaattttagcca

SEQ ID NO: 7455 - RNA, 21 nt, synthetic construct
  source 1..21: mol_type = other RNA
actacaagtcaaaaatgaaga

SEQ ID NO: 7456 - RNA, 21 nt, synthetic construct
  source 1..21: mol_type = other RNA
actacatataaactacaagtc

SEQ ID NO: 7457 - RNA, 21 nt, synthetic construct
  source 1..21: mol_type = other RNA
actagaggaacaataaaaaga

SEQ ID NO: 7458 - RNA, 21 nt, synthetic construct
  source 1..21: mol_type = other RNA
actcaaaacttgaaagcctcc

SEQ ID NO: 7459 - RNA, 21 nt, synthetic construct
  source 1..21: mol_type = other RNA
actcaacatatttgatcagtc

SEQ ID NO: 7460 - RNA, 21 nt, synthetic construct
  source 1..21: mol_type = other RNA
actcaactcaaaacttgaaag

SEQ ID NO: 7461 - RNA, 21 nt, synthetic construct
  source 1..21: mol_type = other RNA
actccagaacacccagaagta

SEQ ID NO: 7462 - RNA, 21 nt, synthetic construct
  source 1..21: mol_type = other RNA
actgaaggaggccattggcta

SEQ ID NO: 7463 - RNA, 21 nt, synthetic construct
  source 1..21: mol_type = other RNA
actgagaagaactacatataa

SEQ ID NO: 7464 - RNA, 21 nt, synthetic construct
  source 1..21: mol_type = other RNA
actgatcaaatatgttgagtt

SEQ ID NO: 7465 - RNA, 21 nt, synthetic construct
  source 1..21: mol_type = other RNA
actggtttgcagcgatagatc

SEQ ID NO: 7466 - RNA, 21 nt, synthetic construct
  source 1..21: mol_type = other RNA
acttaattcaaaatcaacctg

SEQ ID NO: 7467 - RNA, 21 nt, synthetic construct
  source 1..21: mol_type = other RNA
acttactttaagtgaagttac

SEQ ID NO: 7468 - RNA, 21 nt, synthetic construct
  source 1..21: mol_type = other RNA
acttcaacaaaaagtgaaata

SEQ ID NO: 7469 - RNA, 21 nt, synthetic construct
  source 1..21: mol_type = other RNA
acttcacttaaagtaagtaga

SEQ ID NO: 7470 - RNA, 21 nt, synthetic construct
  source 1..21: mol_type = other RNA
acttctgggtgttctggagtt

SEQ ID NO: 7471 - RNA, 21 nt, synthetic construct
  source 1..21: mol_type = other RNA
acttgaaagcctcctagaaga

SEQ ID NO: 7472 - RNA, 21 nt, synthetic construct
  source 1..21: mol_type = other RNA
acttgaactcaactcaaaact

SEQ ID NO: 7473 - RNA, 21 nt, synthetic construct
  source 1..21: mol_type = other RNA
acttgtagtttatatgtagtt

SEQ ID NO: 7474 - RNA, 21 nt, synthetic construct
  source 1..21: mol_type = other RNA
actttaagtgaagttacttct

SEQ ID NO: 7475 - RNA, 21 nt, synthetic construct
  source 1..21: mol_type = other RNA
actttgtccataagacgaagg

SEQ ID NO: 7476 - RNA, 21 nt, synthetic construct
  source 1..21: mol_type = other RNA
actttttgttgaagtagaatt

SEQ ID NO: 7477 - RNA, 21 nt, synthetic construct
  source 1..21: mol_type = other RNA
agaaaaaattctacttcaaca

SEQ ID NO: 7478 - RNA, 21 nt, synthetic construct
  source 1..21: mol_type = other RNA
agaaaaggaactgagaagaac

SEQ ID NO: 7479 - RNA, 21 nt, synthetic construct
  source 1..21: mol_type = other RNA
agaacacccagaagtaacttc

SEQ ID NO: 7480 - RNA, 21 nt, synthetic construct
  source 1..21: mol_type = other RNA
agaactacatataaactacaa

SEQ ID NO: 7481 - RNA, 21 nt, synthetic construct
  source 1..21: mol_type = other RNA
agaagaaaaaattctacttca

SEQ ID NO: 7482 - RNA, 21 nt, synthetic construct
  source 1..21: mol_type = other RNA
agaagaaaaggaactgagaag

SEQ ID NO: 7483 - RNA, 21 nt, synthetic construct
  source 1..21: mol_type = other RNA
agaagaactacatataaacta

SEQ ID NO: 7484 - RNA, 21 nt, synthetic construct
  source 1..21: mol_type = other RNA
agaagaagaaaaggaactgag

SEQ ID NO: 7485 - RNA, 21 nt, synthetic construct
  source 1..21: mol_type = other RNA
agaagagcaactaactaactt

SEQ ID NO: 7486 - RNA, 21 nt, synthetic construct
  source 1..21: mol_type = other RNA
agaagtaacttcacttaaagt

SEQ ID NO: 7487 - RNA, 21 nt, synthetic construct
  source 1..21: mol_type = other RNA
agaatatgtcacttgaactca

SEQ ID NO: 7488 - RNA, 21 nt, synthetic construct
  source 1..21: mol_type = other RNA
agaatcaaatgatgaattgtc

SEQ ID NO: 7489 - RNA, 21 nt, synthetic construct
  source 1..21: mol_type = other RNA
agaattgatcaagacaattca

SEQ ID NO: 7490 - RNA, 21 nt, synthetic construct
  source 1..21: mol_type = other RNA
agaattttttcttctaggagg

SEQ ID NO: 7491 - RNA, 21 nt, synthetic construct
  source 1..21: mol_type = other RNA
agacaattcatcatttgattc

SEQ ID NO: 7492 - RNA, 21 nt, synthetic construct
  source 1..21: mol_type = other RNA
agaccatgtcccaactgaagg

SEQ ID NO: 7493 - RNA, 21 nt, synthetic construct
  source 1..21: mol_type = other RNA
agacgaagggccaaattaatg

SEQ ID NO: 7494 - RNA, 21 nt, synthetic construct
  source 1..21: mol_type = other RNA
agacgatgtaaaaattttagc

SEQ ID NO: 7495 - RNA, 21 nt, synthetic construct
  source 1..21: mol_type = other RNA
agactgatcaaatatgttgag

SEQ ID NO: 7496 - RNA, 21 nt, synthetic construct
  source 1..21: mol_type = other RNA
agactttgtccataagacgaa

SEQ ID NO: 7497 - RNA, 21 nt, synthetic construct
  source 1..21: mol_type = other RNA
agagaatcaaatgatgaattg

SEQ ID NO: 7498 - RNA, 21 nt, synthetic construct
  source 1..21: mol_type = other RNA
agagcaactaactaacttaat

SEQ ID NO: 7499 - RNA, 21 nt, synthetic construct
  source 1..21: mol_type = other RNA
agagccaaaatcaagatttgc

SEQ ID NO: 7500 - RNA, 21 nt, synthetic construct
  source 1..21: mol_type = other RNA
agaggaacaataaaaagaagg

SEQ ID NO: 7501 - RNA, 21 nt, synthetic construct
  source 1..21: mol_type = other RNA
agaggtaaagaatatgtcact

SEQ ID NO: 7502 - RNA, 21 nt, synthetic construct
  source 1..21: mol_type = other RNA
agatagagaatcaaatgatga

SEQ ID NO: 7503 - RNA, 21 nt, synthetic construct
  source 1..21: mol_type = other RNA
agatcataaaaagactgatca

SEQ ID NO: 7504 - RNA, 21 nt, synthetic construct
  source 1..21: mol_type = other RNA
agatttgctatgttagacgat

SEQ ID NO: 7505 - RNA, 21 nt, synthetic construct
  source 1..21: mol_type = other RNA
agcaaatcttgattttggctc

SEQ ID NO: 7506 - RNA, 21 nt, synthetic construct
  source 1..21: mol_type = other RNA
agcaactaactaacttaattc

SEQ ID NO: 7507 - RNA, 21 nt, synthetic construct
  source 1..21: mol_type = other RNA
agccaaaatcaagatttgcta

SEQ ID NO: 7508 - RNA, 21 nt, synthetic construct
  source 1..21: mol_type = other RNA
agccaatggcctccttcagtt

SEQ ID NO: 7509 - RNA, 21 nt, synthetic construct
  source 1..21: mol_type = other RNA
agcctcctagaagaaaaaatt

SEQ ID NO: 7510 - RNA, 21 nt, synthetic construct
  source 1..21: mol_type = other RNA
agcgatagatcataaaaagac

SEQ ID NO: 7511 - RNA, 21 nt, synthetic construct
  source 1..21: mol_type = other RNA
agctccttctttttattgttc

SEQ ID NO: 7512 - RNA, 21 nt, synthetic construct
  source 1..21: mol_type = other RNA
aggaaataactagaggaacaa

SEQ ID NO: 7513 - RNA, 21 nt, synthetic construct
  source 1..21: mol_type = other RNA
aggaacaataaaaagaaggag

SEQ ID NO: 7514 - RNA, 21 nt, synthetic construct
  source 1..21: mol_type = other RNA
aggaactgagaagaactacat

SEQ ID NO: 7515 - RNA, 21 nt, synthetic construct
  source 1..21: mol_type = other RNA
aggaggccattggctaaaatt

SEQ ID NO: 7516 - RNA, 21 nt, synthetic construct
  source 1..21: mol_type = other RNA
aggaggctttcaagttttgag

SEQ ID NO: 7517 - RNA, 21 nt, synthetic construct
  source 1..21: mol_type = other RNA
aggccattggctaaaattttt

SEQ ID NO: 7518 - RNA, 21 nt, synthetic construct
  source 1..21: mol_type = other RNA
aggctttcaagttttgagttg

SEQ ID NO: 7519 - RNA, 21 nt, synthetic construct
  source 1..21: mol_type = other RNA
agggccaaattaatgacatat

SEQ ID NO: 7520 - RNA, 21 nt, synthetic construct
  source 1..21: mol_type = other RNA
aggtaaagaatatgtcacttg

SEQ ID NO: 7521 - RNA, 21 nt, synthetic construct
  source 1..21: mol_type = other RNA
aggttgattttgaattaagtt

SEQ ID NO: 7522 - RNA, 21 nt, synthetic construct
  source 1..21: mol_type = other RNA
agtaacttcacttaaagtaag

SEQ ID NO: 7523 - RNA, 21 nt, synthetic construct
  source 1..21: mol_type = other RNA
agtaagtagaaaataaagagg

SEQ ID NO: 7524 - RNA, 21 nt, synthetic construct
  source 1..21: mol_type = other RNA
agtagaattttttcttctagg

SEQ ID NO: 7525 - RNA, 21 nt, synthetic construct
  source 1..21: mol_type = other RNA
agtcaaaaatgaagaggtaaa

SEQ ID NO: 7526 - RNA, 21 nt, synthetic construct
  source 1..21: mol_type = other RNA
agtctttaagaccatgtccca

SEQ ID NO: 7527 - RNA, 21 nt, synthetic construct
  source 1..21: mol_type = other RNA
agtctttttatgatctatcgc

SEQ ID NO: 7528 - RNA, 21 nt, synthetic construct
  source 1..21: mol_type = other RNA
agtgaaatatttagaagagca

SEQ ID NO: 7529 - RNA, 21 nt, synthetic construct
  source 1..21: mol_type = other RNA
agtgaaatcaaagaagaagaa

SEQ ID NO: 7530 - RNA, 21 nt, synthetic construct
  source 1..21: mol_type = other RNA
agtgaagttacttctgggtgt

SEQ ID NO: 7531 - RNA, 21 nt, synthetic construct
  source 1..21: mol_type = other RNA
agtgacatattctttacctct

SEQ ID NO: 7532 - RNA, 21 nt, synthetic construct
  source 1..21: mol_type = other RNA
agttacttctgggtgttctgg

SEQ ID NO: 7533 - RNA, 21 nt, synthetic construct
  source 1..21: mol_type = other RNA
agttagttagttgctcttcta

SEQ ID NO: 7534 - RNA, 21 nt, synthetic construct
  source 1..21: mol_type = other RNA
agttagttgctcttctaaata

SEQ ID NO: 7535 - RNA, 21 nt, synthetic construct
  source 1..21: mol_type = other RNA
agttatttcctccagaattga

SEQ ID NO: 7536 - RNA, 21 nt, synthetic construct
  source 1..21: mol_type = other RNA
agttcaagtgacatattcttt

SEQ ID NO: 7537 - RNA, 21 nt, synthetic construct
  source 1..21: mol_type = other RNA
agttccttttcttcttctttg

SEQ ID NO: 7538 - RNA, 21 nt, synthetic construct
  source 1..21: mol_type = other RNA
agttcttctcagttccttttc

SEQ ID NO: 7539 - RNA, 21 nt, synthetic construct
  source 1..21: mol_type = other RNA
agttgagttcaagtgacatat

SEQ ID NO: 7540 - RNA, 21 nt, synthetic construct
  source 1..21: mol_type = other RNA
agttgctcttctaaatatttc

SEQ ID NO: 7541 - RNA, 21 nt, synthetic construct
  source 1..21: mol_type = other RNA
agttgggacatggtcttaaag

SEQ ID NO: 7542 - RNA, 21 nt, synthetic construct
  source 1..21: mol_type = other RNA
agtttatatgtagttcttctc

SEQ ID NO: 7543 - RNA, 21 nt, synthetic construct
  source 1..21: mol_type = other RNA
agtttcaggttgattttgaat

SEQ ID NO: 7544 - RNA, 21 nt, synthetic construct
  source 1..21: mol_type = other RNA
agttttgagttgagttcaagt

SEQ ID NO: 7545 - RNA, 21 nt, synthetic construct
  source 1..21: mol_type = other RNA
ataaaaagaaggagcttaatt

SEQ ID NO: 7546 - RNA, 21 nt, synthetic construct
  source 1..21: mol_type = other RNA
ataaactacaagtcaaaaatg

SEQ ID NO: 7547 - RNA, 21 nt, synthetic construct
  source 1..21: mol_type = other RNA
ataactagaggaacaataaaa

SEQ ID NO: 7548 - RNA, 21 nt, synthetic construct
  source 1..21: mol_type = other RNA
ataagacgaagggccaaatta

SEQ ID NO: 7549 - RNA, 21 nt, synthetic construct
  source 1..21: mol_type = other RNA
atagagaatcaaatgatgaat

SEQ ID NO: 7550 - RNA, 21 nt, synthetic construct
  source 1..21: mol_type = other RNA
atagatcataaaaagactgat

SEQ ID NO: 7551 - RNA, 21 nt, synthetic construct
  source 1..21: mol_type = other RNA
atagcaaatcttgattttggc

SEQ ID NO: 7552 - RNA, 21 nt, synthetic construct
  source 1..21: mol_type = other RNA
atatgtagttcttctcagttc

SEQ ID NO: 7553 - RNA, 21 nt, synthetic construct
  source 1..21: mol_type = other RNA
atatgtcacttgaactcaact

SEQ ID NO: 7554 - RNA, 21 nt, synthetic construct
  source 1..21: mol_type = other RNA
atatgtcattaatttggccct

SEQ ID NO: 7555 - RNA, 21 nt, synthetic construct
  source 1..21: mol_type = other RNA
atattctttacctcttcattt

SEQ ID NO: 7556 - RNA, 21 nt, synthetic construct
  source 1..21: mol_type = other RNA
atatttagaagagcaactaac

SEQ ID NO: 7557 - RNA, 21 nt, synthetic construct
  source 1..21: mol_type = other RNA
atatttcactttttgttgaag

SEQ ID NO: 7558 - RNA, 21 nt, synthetic construct
  source 1..21: mol_type = other RNA
atcaaagaagaagaaaaggaa

SEQ ID NO: 7559 - RNA, 21 nt, synthetic construct
  source 1..21: mol_type = other RNA
atcaaatatgttgagtttttg

SEQ ID NO: 7560 - RNA, 21 nt, synthetic construct
  source 1..21: mol_type = other RNA
atcaaatgatgaattgtcttg

SEQ ID NO: 7561 - RNA, 21 nt, synthetic construct
  source 1..21: mol_type = other RNA
atcaacctgaaactccagaac

SEQ ID NO: 7562 - RNA, 21 nt, synthetic construct
  source 1..21: mol_type = other RNA
atcaagacaattcatcatttg

SEQ ID NO: 7563 - RNA, 21 nt, synthetic construct
  source 1..21: mol_type = other RNA
atcaagatttgctatgttaga

SEQ ID NO: 7564 - RNA, 21 nt, synthetic construct
  source 1..21: mol_type = other RNA
atcaattctggaggaaataac

SEQ ID NO: 7565 - RNA, 21 nt, synthetic construct
  source 1..21: mol_type = other RNA
atcagtctttttatgatctat

SEQ ID NO: 7566 - RNA, 21 nt, synthetic construct
  source 1..21: mol_type = other RNA
atcataaaaagactgatcaaa

SEQ ID NO: 7567 - RNA, 21 nt, synthetic construct
  source 1..21: mol_type = other RNA
atcatttgattctctatctcc

SEQ ID NO: 7568 - RNA, 21 nt, synthetic construct
  source 1..21: mol_type = other RNA
atcgctgcaaaccagtgaaat

SEQ ID NO: 7569 - RNA, 21 nt, synthetic construct
  source 1..21: mol_type = other RNA
atcgtctaacatagcaaatct

SEQ ID NO: 7570 - RNA, 21 nt, synthetic construct
  source 1..21: mol_type = other RNA
atctatcgctgcaaaccagtg

SEQ ID NO: 7571 - RNA, 21 nt, synthetic construct
  source 1..21: mol_type = other RNA
atctccagagccaaaatcaag

SEQ ID NO: 7572 - RNA, 21 nt, synthetic construct
  source 1..21: mol_type = other RNA
atcttgattttggctctggag

SEQ ID NO: 7573 - RNA, 21 nt, synthetic construct
  source 1..21: mol_type = other RNA
atgaaccctctttattttcta

SEQ ID NO: 7574 - RNA, 21 nt, synthetic construct
  source 1..21: mol_type = other RNA
atgaagaggtaaagaatatgt

SEQ ID NO: 7575 - RNA, 21 nt, synthetic construct
  source 1..21: mol_type = other RNA
atgaattgtcttgatcaattc

SEQ ID NO: 7576 - RNA, 21 nt, synthetic construct
  source 1..21: mol_type = other RNA
atgacatatttcaaaaactca

SEQ ID NO: 7577 - RNA, 21 nt, synthetic construct
  source 1..21: mol_type = other RNA
atgatctatcgctgcaaacca

SEQ ID NO: 7578 - RNA, 21 nt, synthetic construct
  source 1..21: mol_type = other RNA
atgatgaattgtcttgatcaa

SEQ ID NO: 7579 - RNA, 21 nt, synthetic construct
  source 1..21: mol_type = other RNA
atggacaaagtctttaagacc

SEQ ID NO: 7580 - RNA, 21 nt, synthetic construct
  source 1..21: mol_type = other RNA
atggcctccttcagttgggac

SEQ ID NO: 7581 - RNA, 21 nt, synthetic construct
  source 1..21: mol_type = other RNA
atggtcttaaagactttgtcc

SEQ ID NO: 7582 - RNA, 21 nt, synthetic construct
  source 1..21: mol_type = other RNA
atgtaaaaattttagccaatg

SEQ ID NO: 7583 - RNA, 21 nt, synthetic construct
  source 1..21: mol_type = other RNA
atgtagttcttctcagttcct

SEQ ID NO: 7584 - RNA, 21 nt, synthetic construct
  source 1..21: mol_type = other RNA
atgtcacttgaactcaactca

SEQ ID NO: 7585 - RNA, 21 nt, synthetic construct
  source 1..21: mol_type = other RNA
atgtcattaatttggcccttc

SEQ ID NO: 7586 - RNA, 21 nt, synthetic construct
  source 1..21: mol_type = other RNA
atgtcccaactgaaggaggcc

SEQ ID NO: 7587 - RNA, 21 nt, synthetic construct
  source 1..21: mol_type = other RNA
atgttagacgatgtaaaaatt

SEQ ID NO: 7588 - RNA, 21 nt, synthetic construct
  source 1..21: mol_type = other RNA
atgttcacaattaagctcctt

SEQ ID NO: 7589 - RNA, 21 nt, synthetic construct
  source 1..21: mol_type = other RNA
atgttgagtttttgaaatatg

SEQ ID NO: 7590 - RNA, 21 nt, synthetic construct
  source 1..21: mol_type = other RNA
attaagctccttctttttatt

SEQ ID NO: 7591 - RNA, 21 nt, synthetic construct
  source 1..21: mol_type = other RNA
attaagttagttagttgctct

SEQ ID NO: 7592 - RNA, 21 nt, synthetic construct
  source 1..21: mol_type = other RNA
attaatttggcccttcgtctt

SEQ ID NO: 7593 - RNA, 21 nt, synthetic construct
  source 1..21: mol_type = other RNA
attcaaaatcaacctgaaact

SEQ ID NO: 7594 - RNA, 21 nt, synthetic construct
  source 1..21: mol_type = other RNA
attcatcatttgattctctat

SEQ ID NO: 7595 - RNA, 21 nt, synthetic construct
  source 1..21: mol_type = other RNA
attctacttcaacaaaaagtg

SEQ ID NO: 7596 - RNA, 21 nt, synthetic construct
  source 1..21: mol_type = other RNA
attctctatctccagagccaa

SEQ ID NO: 7597 - RNA, 21 nt, synthetic construct
  source 1..21: mol_type = other RNA
attctggaggaaataactaga

SEQ ID NO: 7598 - RNA, 21 nt, synthetic construct
  source 1..21: mol_type = other RNA
attctttacctcttcattttt

SEQ ID NO: 7599 - RNA, 21 nt, synthetic construct
  source 1..21: mol_type = other RNA
attgatcaagacaattcatca

SEQ ID NO: 7600 - RNA, 21 nt, synthetic construct
  source 1..21: mol_type = other RNA
attggctaaaatttttacatc

SEQ ID NO: 7601 - RNA, 21 nt, synthetic construct
  source 1..21: mol_type = other RNA
attgtcttgatcaattctgga

SEQ ID NO: 7602 - RNA, 21 nt, synthetic construct
  source 1..21: mol_type = other RNA
attgttcctctagttatttcc

SEQ ID NO: 7603 - RNA, 21 nt, synthetic construct
  source 1..21: mol_type = other RNA
atttagaagagcaactaacta

SEQ ID NO: 7604 - RNA, 21 nt, synthetic construct
  source 1..21: mol_type = other RNA
atttcactggtttgcagcgat

SEQ ID NO: 7605 - RNA, 21 nt, synthetic construct
  source 1..21: mol_type = other RNA
atttcactttttgttgaagta

SEQ ID NO: 7606 - RNA, 21 nt, synthetic construct
  source 1..21: mol_type = other RNA
atttcctccagaattgatcaa

SEQ ID NO: 7607 - RNA, 21 nt, synthetic construct
  source 1..21: mol_type = other RNA
atttgatcagtctttttatga

SEQ ID NO: 7608 - RNA, 21 nt, synthetic construct
  source 1..21: mol_type = other RNA
atttgattctctatctccaga

SEQ ID NO: 7609 - RNA, 21 nt, synthetic construct
  source 1..21: mol_type = other RNA
atttgctatgttagacgatgt

SEQ ID NO: 7610 - RNA, 21 nt, synthetic construct
  source 1..21: mol_type = other RNA
atttggcccttcgtcttatgg

SEQ ID NO: 7611 - RNA, 21 nt, synthetic construct
  source 1..21: mol_type = other RNA
attttagccaatggcctcctt

SEQ ID NO: 7612 - RNA, 21 nt, synthetic construct
  source 1..21: mol_type = other RNA
attttctacttactttaagtg

SEQ ID NO: 7613 - RNA, 21 nt, synthetic construct
  source 1..21: mol_type = other RNA
attttggctctggagatagag

SEQ ID NO: 7614 - RNA, 21 nt, synthetic construct
  source 1..21: mol_type = other RNA
atttttacatcgtctaacata

SEQ ID NO: 7615 - RNA, 21 nt, synthetic construct
  source 1..21: mol_type = other RNA
attttttcttctaggaggctt

SEQ ID NO: 7616 - RNA, 21 nt, synthetic construct
  source 1..21: mol_type = other RNA
caaaaactcaacatatttgat

SEQ ID NO: 7617 - RNA, 21 nt, synthetic construct
  source 1..21: mol_type = other RNA
caaaaatgaagaggtaaagaa

SEQ ID NO: 7618 - RNA, 21 nt, synthetic construct
  source 1..21: mol_type = other RNA
caaaacttgaaagcctcctag

SEQ ID NO: 7619 - RNA, 21 nt, synthetic construct
  source 1..21: mol_type = other RNA
caaaatcaacctgaaactcca

SEQ ID NO: 7620 - RNA, 21 nt, synthetic construct
  source 1..21: mol_type = other RNA
caaaatcaagatttgctatgt

SEQ ID NO: 7621 - RNA, 21 nt, synthetic construct
  source 1..21: mol_type = other RNA
caaaccagtgaaatcaaagaa

SEQ ID NO: 7622 - RNA, 21 nt, synthetic construct
  source 1..21: mol_type = other RNA
caaagaagaagaaaaggaact

SEQ ID NO: 7623 - RNA, 21 nt, synthetic construct
  source 1..21: mol_type = other RNA
caaagtctttaagaccatgtc

SEQ ID NO: 7624 - RNA, 21 nt, synthetic construct
  source 1..21: mol_type = other RNA
caaatatgttgagtttttgaa

SEQ ID NO: 7625 - RNA, 21 nt, synthetic construct
  source 1..21: mol_type = other RNA
caaatcttgattttggctctg

SEQ ID NO: 7626 - RNA, 21 nt, synthetic construct
  source 1..21: mol_type = other RNA
caaatgatgaattgtcttgat

SEQ ID NO: 7627 - RNA, 21 nt, synthetic construct
  source 1..21: mol_type = other RNA
caacatatttgatcagtcttt

SEQ ID NO: 7628 - RNA, 21 nt, synthetic construct
  source 1..21: mol_type = other RNA
caacctgaaactccagaacac

SEQ ID NO: 7629 - RNA, 21 nt, synthetic construct
  source 1..21: mol_type = other RNA
caactaactaacttaattcaa

SEQ ID NO: 7630 - RNA, 21 nt, synthetic construct
  source 1..21: mol_type = other RNA
caactcaaaacttgaaagcct

SEQ ID NO: 7631 - RNA, 21 nt, synthetic construct
  source 1..21: mol_type = other RNA
caactgaaggaggccattggc

SEQ ID NO: 7632 - RNA, 21 nt, synthetic construct
  source 1..21: mol_type = other RNA
caagacaattcatcatttgat

SEQ ID NO: 7633 - RNA, 21 nt, synthetic construct
  source 1..21: mol_type = other RNA
caagatttgctatgttagacg

SEQ ID NO: 7634 - RNA, 21 nt, synthetic construct
  source 1..21: mol_type = other RNA
caagtcaaaaatgaagaggta

SEQ ID NO: 7635 - RNA, 21 nt, synthetic construct
  source 1..21: mol_type = other RNA
caagtgacatattctttacct

SEQ ID NO: 7636 - RNA, 21 nt, synthetic construct
  source 1..21: mol_type = other RNA
caagttttgagttgagttcaa

SEQ ID NO: 7637 - RNA, 21 nt, synthetic construct
  source 1..21: mol_type = other RNA
caataaaaagaaggagcttaa

SEQ ID NO: 7638 - RNA, 21 nt, synthetic construct
  source 1..21: mol_type = other RNA
caatggcctccttcagttggg

SEQ ID NO: 7639 - RNA, 21 nt, synthetic construct
  source 1..21: mol_type = other RNA
caattaagctccttcttttta

SEQ ID NO: 7640 - RNA, 21 nt, synthetic construct
  source 1..21: mol_type = other RNA
caattcatcatttgattctct

SEQ ID NO: 7641 - RNA, 21 nt, synthetic construct
  source 1..21: mol_type = other RNA
caattctggaggaaataacta

SEQ ID NO: 7642 - RNA, 21 nt, synthetic construct
  source 1..21: mol_type = other RNA
cacaattaagctccttctttt

SEQ ID NO: 7643 - RNA, 21 nt, synthetic construct
  source 1..21: mol_type = other RNA
cacccagaagtaacttcactt

SEQ ID NO: 7644 - RNA, 21 nt, synthetic construct
  source 1..21: mol_type = other RNA
cactggtttgcagcgatagat

SEQ ID NO: 7645 - RNA, 21 nt, synthetic construct
  source 1..21: mol_type = other RNA
cacttaaagtaagtagaaaat

SEQ ID NO: 7646 - RNA, 21 nt, synthetic construct
  source 1..21: mol_type = other RNA
cacttgaactcaactcaaaac

SEQ ID NO: 7647 - RNA, 21 nt, synthetic construct
  source 1..21: mol_type = other RNA
cactttttgttgaagtagaat

SEQ ID NO: 7648 - RNA, 21 nt, synthetic construct
  source 1..21: mol_type = other RNA
cagaacacccagaagtaactt

SEQ ID NO: 7649 - RNA, 21 nt, synthetic construct
  source 1..21: mol_type = other RNA
cagaagtaacttcacttaaag

SEQ ID NO: 7650 - RNA, 21 nt, synthetic construct
  source 1..21: mol_type = other RNA
cagaattgatcaagacaattc

SEQ ID NO: 7651 - RNA, 21 nt, synthetic construct
  source 1..21: mol_type = other RNA
cagagccaaaatcaagatttg

SEQ ID NO: 7652 - RNA, 21 nt, synthetic construct
  source 1..21: mol_type = other RNA
cagcgatagatcataaaaaga

SEQ ID NO: 7653 - RNA, 21 nt, synthetic construct
  source 1..21: mol_type = other RNA
caggttgattttgaattaagt

SEQ ID NO: 7654 - RNA, 21 nt, synthetic construct
  source 1..21: mol_type = other RNA
cagtctttttatgatctatcg

SEQ ID NO: 7655 - RNA, 21 nt, synthetic construct
  source 1..21: mol_type = other RNA
cagtgaaatcaaagaagaaga

SEQ ID NO: 7656 - RNA, 21 nt, synthetic construct
  source 1..21: mol_type = other RNA
cagttccttttcttcttcttt

SEQ ID NO: 7657 - RNA, 21 nt, synthetic construct
  source 1..21: mol_type = other RNA
cagttgggacatggtcttaaa

SEQ ID NO: 7658 - RNA, 21 nt, synthetic construct
  source 1..21: mol_type = other RNA
cataaaaagactgatcaaata

SEQ ID NO: 7659 - RNA, 21 nt, synthetic construct
  source 1..21: mol_type = other RNA
cataagacgaagggccaaatt

SEQ ID NO: 7660 - RNA, 21 nt, synthetic construct
  source 1..21: mol_type = other RNA
catagcaaatcttgattttgg

SEQ ID NO: 7661 - RNA, 21 nt, synthetic construct
  source 1..21: mol_type = other RNA
catataaactacaagtcaaaa

SEQ ID NO: 7662 - RNA, 21 nt, synthetic construct
  source 1..21: mol_type = other RNA
catattctttacctcttcatt

SEQ ID NO: 7663 - RNA, 21 nt, synthetic construct
  source 1..21: mol_type = other RNA
catatttcaaaaactcaacat

SEQ ID NO: 7664 - RNA, 21 nt, synthetic construct
  source 1..21: mol_type = other RNA
catatttgatcagtcttttta

SEQ ID NO: 7665 - RNA, 21 nt, synthetic construct
  source 1..21: mol_type = other RNA
catcatttgattctctatctc

SEQ ID NO: 7666 - RNA, 21 nt, synthetic construct
  source 1..21: mol_type = other RNA
catcgtctaacatagcaaatc

SEQ ID NO: 7667 - RNA, 21 nt, synthetic construct
  source 1..21: mol_type = other RNA
catgaaccctctttattttct

SEQ ID NO: 7668 - RNA, 21 nt, synthetic construct
  source 1..21: mol_type = other RNA
catggtcttaaagactttgtc

SEQ ID NO: 7669 - RNA, 21 nt, synthetic construct
  source 1..21: mol_type = other RNA
catgtcccaactgaaggaggc

SEQ ID NO: 7670 - RNA, 21 nt, synthetic construct
  source 1..21: mol_type = other RNA
cattaatttggcccttcgtct

SEQ ID NO: 7671 - RNA, 21 nt, synthetic construct
  source 1..21: mol_type = other RNA
cattggctaaaatttttacat

SEQ ID NO: 7672 - RNA, 21 nt, synthetic construct
  source 1..21: mol_type = other RNA
catttgattctctatctccag

SEQ ID NO: 7673 - RNA, 21 nt, synthetic construct
  source 1..21: mol_type = other RNA
catttttgacttgtagtttat

SEQ ID NO: 7674 - RNA, 21 nt, synthetic construct
  source 1..21: mol_type = other RNA
ccaaaatcaagatttgctatg

SEQ ID NO: 7675 - RNA, 21 nt, synthetic construct
  source 1..21: mol_type = other RNA
ccaaattaatgacatatttca

SEQ ID NO: 7676 - RNA, 21 nt, synthetic construct
  source 1..21: mol_type = other RNA
ccaactgaaggaggccattgg

SEQ ID NO: 7677 - RNA, 21 nt, synthetic construct
  source 1..21: mol_type = other RNA
ccaatggcctccttcagttgg

SEQ ID NO: 7678 - RNA, 21 nt, synthetic construct
  source 1..21: mol_type = other RNA
ccagaacacccagaagtaact

SEQ ID NO: 7679 - RNA, 21 nt, synthetic construct
  source 1..21: mol_type = other RNA
ccagaagtaacttcacttaaa

SEQ ID NO: 7680 - RNA, 21 nt, synthetic construct
  source 1..21: mol_type = other RNA
ccagaattgatcaagacaatt

SEQ ID NO: 7681 - RNA, 21 nt, synthetic construct
  source 1..21: mol_type = other RNA
ccagagccaaaatcaagattt

SEQ ID NO: 7682 - RNA, 21 nt, synthetic construct
  source 1..21: mol_type = other RNA
ccagtgaaatcaaagaagaag

SEQ ID NO: 7683 - RNA, 21 nt, synthetic construct
  source 1..21: mol_type = other RNA
ccataagacgaagggccaaat

SEQ ID NO: 7684 - RNA, 21 nt, synthetic construct
  source 1..21: mol_type = other RNA
ccatgtcccaactgaaggagg

SEQ ID NO: 7685 - RNA, 21 nt, synthetic construct
  source 1..21: mol_type = other RNA
ccattggctaaaatttttaca

SEQ ID NO: 7686 - RNA, 21 nt, synthetic construct
  source 1..21: mol_type = other RNA
cccaactgaaggaggccattg

SEQ ID NO: 7687 - RNA, 21 nt, synthetic construct
  source 1..21: mol_type = other RNA
cccagaagtaacttcacttaa

SEQ ID NO: 7688 - RNA, 21 nt, synthetic construct
  source 1..21: mol_type = other RNA
ccctctttattttctacttac

SEQ ID NO: 7689 - RNA, 21 nt, synthetic construct
  source 1..21: mol_type = other RNA
cccttcgtcttatggacaaag

SEQ ID NO: 7690 - RNA, 21 nt, synthetic construct
  source 1..21: mol_type = other RNA
cctagaagaaaaaattctact

SEQ ID NO: 7691 - RNA, 21 nt, synthetic construct
  source 1..21: mol_type = other RNA
cctccagaattgatcaagaca

SEQ ID NO: 7692 - RNA, 21 nt, synthetic construct
  source 1..21: mol_type = other RNA
cctcctagaagaaaaaattct

SEQ ID NO: 7693 - RNA, 21 nt, synthetic construct
  source 1..21: mol_type = other RNA
cctccttcagttgggacatgg

SEQ ID NO: 7694 - RNA, 21 nt, synthetic construct
  source 1..21: mol_type = other RNA
cctctagttatttcctccaga

SEQ ID NO: 7695 - RNA, 21 nt, synthetic construct
  source 1..21: mol_type = other RNA
cctcttcatttttgacttgta

SEQ ID NO: 7696 - RNA, 21 nt, synthetic construct
  source 1..21: mol_type = other RNA
cctctttattttctacttact

SEQ ID NO: 7697 - RNA, 21 nt, synthetic construct
  source 1..21: mol_type = other RNA
cctgaaactccagaacaccca

SEQ ID NO: 7698 - RNA, 21 nt, synthetic construct
  source 1..21: mol_type = other RNA
ccttcagttgggacatggtct

SEQ ID NO: 7699 - RNA, 21 nt, synthetic construct
  source 1..21: mol_type = other RNA
ccttcgtcttatggacaaagt

SEQ ID NO: 7700 - RNA, 21 nt, synthetic construct
  source 1..21: mol_type = other RNA
ccttctttttattgttcctct

SEQ ID NO: 7701 - RNA, 21 nt, synthetic construct
  source 1..21: mol_type = other RNA
ccttttcttcttctttgattt

SEQ ID NO: 7702 - RNA, 21 nt, synthetic construct
  source 1..21: mol_type = other RNA
cgaagggccaaattaatgaca

SEQ ID NO: 7703 - RNA, 21 nt, synthetic construct
  source 1..21: mol_type = other RNA
cgatagatcataaaaagactg

SEQ ID NO: 7704 - RNA, 21 nt, synthetic construct
  source 1..21: mol_type = other RNA
cgatgtaaaaattttagccaa

SEQ ID NO: 7705 - RNA, 21 nt, synthetic construct
  source 1..21: mol_type = other RNA
cgctgcaaaccagtgaaatca

SEQ ID NO: 7706 - RNA, 21 nt, synthetic construct
  source 1..21: mol_type = other RNA
cgtctaacatagcaaatcttg

SEQ ID NO: 7707 - RNA, 21 nt, synthetic construct
  source 1..21: mol_type = other RNA
cgtcttatggacaaagtcttt

SEQ ID NO: 7708 - RNA, 21 nt, synthetic construct
  source 1..21: mol_type = other RNA
ctaaaatttttacatcgtcta

SEQ ID NO: 7709 - RNA, 21 nt, synthetic construct
  source 1..21: mol_type = other RNA
ctaacatagcaaatcttgatt

SEQ ID NO: 7710 - RNA, 21 nt, synthetic construct
  source 1..21: mol_type = other RNA
ctaacttaattcaaaatcaac

SEQ ID NO: 7711 - RNA, 21 nt, synthetic construct
  source 1..21: mol_type = other RNA
ctacaagtcaaaaatgaagag

SEQ ID NO: 7712 - RNA, 21 nt, synthetic construct
  source 1..21: mol_type = other RNA
ctacatataaactacaagtca

SEQ ID NO: 7713 - RNA, 21 nt, synthetic construct
  source 1..21: mol_type = other RNA
ctacttactttaagtgaagtt

SEQ ID NO: 7714 - RNA, 21 nt, synthetic construct
  source 1..21: mol_type = other RNA
ctacttcaacaaaaagtgaaa

SEQ ID NO: 7715 - RNA, 21 nt, synthetic construct
  source 1..21: mol_type = other RNA
ctagaagaaaaaattctactt

SEQ ID NO: 7716 - RNA, 21 nt, synthetic construct
  source 1..21: mol_type = other RNA
ctagaggaacaataaaaagaa

SEQ ID NO: 7717 - RNA, 21 nt, synthetic construct
  source 1..21: mol_type = other RNA
ctaggaggctttcaagttttg

SEQ ID NO: 7718 - RNA, 21 nt, synthetic construct
  source 1..21: mol_type = other RNA
ctagttatttcctccagaatt

SEQ ID NO: 7719 - RNA, 21 nt, synthetic construct
  source 1..21: mol_type = other RNA
ctatcgctgcaaaccagtgaa

SEQ ID NO: 7720 - RNA, 21 nt, synthetic construct
  source 1..21: mol_type = other RNA
ctatctccagagccaaaatca

SEQ ID NO: 7721 - RNA, 21 nt, synthetic construct
  source 1..21: mol_type = other RNA
ctatgttagacgatgtaaaaa

SEQ ID NO: 7722 - RNA, 21 nt, synthetic construct
  source 1..21: mol_type = other RNA
ctcaaaacttgaaagcctcct

SEQ ID NO: 7723 - RNA, 21 nt, synthetic construct
  source 1..21: mol_type = other RNA
ctcaacatatttgatcagtct

SEQ ID NO: 7724 - RNA, 21 nt, synthetic construct
  source 1..21: mol_type = other RNA
ctcaactcaaaacttgaaagc

SEQ ID NO: 7725 - RNA, 21 nt, synthetic construct
  source 1..21: mol_type = other RNA
ctcagttccttttcttcttct

SEQ ID NO: 7726 - RNA, 21 nt, synthetic construct
  source 1..21: mol_type = other RNA
ctccagaacacccagaagtaa

SEQ ID NO: 7727 - RNA, 21 nt, synthetic construct
  source 1..21: mol_type = other RNA
ctccagaattgatcaagacaa

SEQ ID NO: 7728 - RNA, 21 nt, synthetic construct
  source 1..21: mol_type = other RNA
ctccagagccaaaatcaagat

SEQ ID NO: 7729 - RNA, 21 nt, synthetic construct
  source 1..21: mol_type = other RNA
ctcctagaagaaaaaattcta

SEQ ID NO: 7730 - RNA, 21 nt, synthetic construct
  source 1..21: mol_type = other RNA
ctccttcagttgggacatggt

SEQ ID NO: 7731 - RNA, 21 nt, synthetic construct
  source 1..21: mol_type = other RNA
ctccttctttttattgttcct

SEQ ID NO: 7732 - RNA, 21 nt, synthetic construct
  source 1..21: mol_type = other RNA
ctctagttatttcctccagaa

SEQ ID NO: 7733 - RNA, 21 nt, synthetic construct
  source 1..21: mol_type = other RNA
ctctatctccagagccaaaat

SEQ ID NO: 7734 - RNA, 21 nt, synthetic construct
  source 1..21: mol_type = other RNA
ctctggagatagagaatcaaa

SEQ ID NO: 7735 - RNA, 21 nt, synthetic construct
  source 1..21: mol_type = other RNA
ctcttcatttttgacttgtag

SEQ ID NO: 7736 - RNA, 21 nt, synthetic construct
  source 1..21: mol_type = other RNA
ctcttctaaatatttcacttt

SEQ ID NO: 7737 - RNA, 21 nt, synthetic construct
  source 1..21: mol_type = other RNA
ctctttattttctacttactt

SEQ ID NO: 7738 - RNA, 21 nt, synthetic construct
  source 1..21: mol_type = other RNA
ctgaaactccagaacacccag

SEQ ID NO: 7739 - RNA, 21 nt, synthetic construct
  source 1..21: mol_type = other RNA
ctgaaggaggccattggctaa

SEQ ID NO: 7740 - RNA, 21 nt, synthetic construct
  source 1..21: mol_type = other RNA
ctgagaagaactacatataaa

SEQ ID NO: 7741 - RNA, 21 nt, synthetic construct
  source 1..21: mol_type = other RNA
ctgatcaaatatgttgagttt

SEQ ID NO: 7742 - RNA, 21 nt, synthetic construct
  source 1..21: mol_type = other RNA
ctgcaaaccagtgaaatcaaa

SEQ ID NO: 7743 - RNA, 21 nt, synthetic construct
  source 1..21: mol_type = other RNA
ctggagatagagaatcaaatg

SEQ ID NO: 7744 - RNA, 21 nt, synthetic construct
  source 1..21: mol_type = other RNA
ctggaggaaataactagagga

SEQ ID NO: 7745 - RNA, 21 nt, synthetic construct
  source 1..21: mol_type = other RNA
ctggagtttcaggttgatttt

SEQ ID NO: 7746 - RNA, 21 nt, synthetic construct
  source 1..21: mol_type = other RNA
ctgggtgttctggagtttcag

SEQ ID NO: 7747 - RNA, 21 nt, synthetic construct
  source 1..21: mol_type = other RNA
ctggtttgcagcgatagatca

SEQ ID NO: 7748 - RNA, 21 nt, synthetic construct
  source 1..21: mol_type = other RNA
cttaaagactttgtccataag

SEQ ID NO: 7749 - RNA, 21 nt, synthetic construct
  source 1..21: mol_type = other RNA
cttaattcaaaatcaacctga

SEQ ID NO: 7750 - RNA, 21 nt, synthetic construct
  source 1..21: mol_type = other RNA
cttactttaagtgaagttact

SEQ ID NO: 7751 - RNA, 21 nt, synthetic construct
  source 1..21: mol_type = other RNA
cttatggacaaagtctttaag

SEQ ID NO: 7752 - RNA, 21 nt, synthetic construct
  source 1..21: mol_type = other RNA
cttcaacaaaaagtgaaatat

SEQ ID NO: 7753 - RNA, 21 nt, synthetic construct
  source 1..21: mol_type = other RNA
cttcacttaaagtaagtagaa

SEQ ID NO: 7754 - RNA, 21 nt, synthetic construct
  source 1..21: mol_type = other RNA
cttcagttgggacatggtctt

SEQ ID NO: 7755 - RNA, 21 nt, synthetic construct
  source 1..21: mol_type = other RNA
cttcatttttgacttgtagtt

SEQ ID NO: 7756 - RNA, 21 nt, synthetic construct
  source 1..21: mol_type = other RNA
cttcgtcttatggacaaagtc

SEQ ID NO: 7757 - RNA, 21 nt, synthetic construct
  source 1..21: mol_type = other RNA
cttctaggaggctttcaagtt

SEQ ID NO: 7758 - RNA, 21 nt, synthetic construct
  source 1..21: mol_type = other RNA
cttctcagttccttttcttct

SEQ ID NO: 7759 - RNA, 21 nt, synthetic construct
  source 1..21: mol_type = other RNA
cttctgggtgttctggagttt

SEQ ID NO: 7760 - RNA, 21 nt, synthetic construct
  source 1..21: mol_type = other RNA
cttcttctttgatttcactgg

SEQ ID NO: 7761 - RNA, 21 nt, synthetic construct
  source 1..21: mol_type = other RNA
cttctttgatttcactggttt

SEQ ID NO: 7762 - RNA, 21 nt, synthetic construct
  source 1..21: mol_type = other RNA
cttctttttattgttcctcta

SEQ ID NO: 7763 - RNA, 21 nt, synthetic construct
  source 1..21: mol_type = other RNA
cttgaaagcctcctagaagaa

SEQ ID NO: 7764 - RNA, 21 nt, synthetic construct
  source 1..21: mol_type = other RNA
cttgaactcaactcaaaactt

SEQ ID NO: 7765 - RNA, 21 nt, synthetic construct
  source 1..21: mol_type = other RNA
cttgatcaattctggaggaaa

SEQ ID NO: 7766 - RNA, 21 nt, synthetic construct
  source 1..21: mol_type = other RNA
cttgattttggctctggagat

SEQ ID NO: 7767 - RNA, 21 nt, synthetic construct
  source 1..21: mol_type = other RNA
cttgtagtttatatgtagttc

SEQ ID NO: 7768 - RNA, 21 nt, synthetic construct
  source 1..21: mol_type = other RNA
ctttaagaccatgtcccaact

SEQ ID NO: 7769 - RNA, 21 nt, synthetic construct
  source 1..21: mol_type = other RNA
ctttaagtgaagttacttctg

SEQ ID NO: 7770 - RNA, 21 nt, synthetic construct
  source 1..21: mol_type = other RNA
ctttacctcttcatttttgac

SEQ ID NO: 7771 - RNA, 21 nt, synthetic construct
  source 1..21: mol_type = other RNA
ctttcaagttttgagttgagt

SEQ ID NO: 7772 - RNA, 21 nt, synthetic construct
  source 1..21: mol_type = other RNA
ctttgatttcactggtttgca

SEQ ID NO: 7773 - RNA, 21 nt, synthetic construct
  source 1..21: mol_type = other RNA
ctttgtccataagacgaaggg

SEQ ID NO: 7774 - RNA, 21 nt, synthetic construct
  source 1..21: mol_type = other RNA
cttttcttcttctttgatttc

SEQ ID NO: 7775 - RNA, 21 nt, synthetic construct
  source 1..21: mol_type = other RNA
ctttttatgatctatcgctgc

SEQ ID NO: 7776 - RNA, 21 nt, synthetic construct
  source 1..21: mol_type = other RNA
ctttttattgttcctctagtt

SEQ ID NO: 7777 - RNA, 21 nt, synthetic construct
  source 1..21: mol_type = other RNA
ctttttgttgaagtagaattt

SEQ ID NO: 7778 - RNA, 21 nt, synthetic construct
  source 1..21: mol_type = other RNA
gaaaaaattctacttcaacaa

SEQ ID NO: 7779 - RNA, 21 nt, synthetic construct
  source 1..21: mol_type = other RNA
gaaaaggaactgagaagaact

SEQ ID NO: 7780 - RNA, 21 nt, synthetic construct
  source 1..21: mol_type = other RNA
gaaactccagaacacccagaa

SEQ ID NO: 7781 - RNA, 21 nt, synthetic construct
  source 1..21: mol_type = other RNA
gaaagcctcctagaagaaaaa

SEQ ID NO: 7782 - RNA, 21 nt, synthetic construct
  source 1..21: mol_type = other RNA
gaaataactagaggaacaata

SEQ ID NO: 7783 - RNA, 21 nt, synthetic construct
  source 1..21: mol_type = other RNA
gaaatatgtcattaatttggc

SEQ ID NO: 7784 - RNA, 21 nt, synthetic construct
  source 1..21: mol_type = other RNA
gaaatatttagaagagcaact

SEQ ID NO: 7785 - RNA, 21 nt, synthetic construct
  source 1..21: mol_type = other RNA
gaaatcaaagaagaagaaaag

SEQ ID NO: 7786 - RNA, 21 nt, synthetic construct
  source 1..21: mol_type = other RNA
gaacaataaaaagaaggagct

SEQ ID NO: 7787 - RNA, 21 nt, synthetic construct
  source 1..21: mol_type = other RNA
gaacacccagaagtaacttca

SEQ ID NO: 7788 - RNA, 21 nt, synthetic construct
  source 1..21: mol_type = other RNA
gaaccctctttattttctact

SEQ ID NO: 7789 - RNA, 21 nt, synthetic construct
  source 1..21: mol_type = other RNA
gaactacatataaactacaag

SEQ ID NO: 7790 - RNA, 21 nt, synthetic construct
  source 1..21: mol_type = other RNA
gaactcaactcaaaacttgaa

SEQ ID NO: 7791 - RNA, 21 nt, synthetic construct
  source 1..21: mol_type = other RNA
gaactgagaagaactacatat

SEQ ID NO: 7792 - RNA, 21 nt, synthetic construct
  source 1..21: mol_type = other RNA
gaagaaaaaattctacttcaa

SEQ ID NO: 7793 - RNA, 21 nt, synthetic construct
  source 1..21: mol_type = other RNA
gaagaaaaggaactgagaaga

SEQ ID NO: 7794 - RNA, 21 nt, synthetic construct
  source 1..21: mol_type = other RNA
gaagaactacatataaactac

SEQ ID NO: 7795 - RNA, 21 nt, synthetic construct
  source 1..21: mol_type = other RNA
gaagaagaaaaggaactgaga

SEQ ID NO: 7796 - RNA, 21 nt, synthetic construct
  source 1..21: mol_type = other RNA
gaagagcaactaactaactta

SEQ ID NO: 7797 - RNA, 21 nt, synthetic construct
  source 1..21: mol_type = other RNA
gaagaggtaaagaatatgtca

SEQ ID NO: 7798 - RNA, 21 nt, synthetic construct
  source 1..21: mol_type = other RNA
gaaggaggccattggctaaaa

SEQ ID NO: 7799 - RNA, 21 nt, synthetic construct
  source 1..21: mol_type = other RNA
gaagggccaaattaatgacat

SEQ ID NO: 7800 - RNA, 21 nt, synthetic construct
  source 1..21: mol_type = other RNA
gaagtaacttcacttaaagta

SEQ ID NO: 7801 - RNA, 21 nt, synthetic construct
  source 1..21: mol_type = other RNA
gaagtagaattttttcttcta

SEQ ID NO: 7802 - RNA, 21 nt, synthetic construct
  source 1..21: mol_type = other RNA
gaagttacttctgggtgttct

SEQ ID NO: 7803 - RNA, 21 nt, synthetic construct
  source 1..21: mol_type = other RNA
gaatatgtcacttgaactcaa

SEQ ID NO: 7804 - RNA, 21 nt, synthetic construct
  source 1..21: mol_type = other RNA
gaatcaaatgatgaattgtct

SEQ ID NO: 7805 - RNA, 21 nt, synthetic construct
  source 1..21: mol_type = other RNA
gaattaagttagttagttgct

SEQ ID NO: 7806 - RNA, 21 nt, synthetic construct
  source 1..21: mol_type = other RNA
gaattgatcaagacaattcat

SEQ ID NO: 7807 - RNA, 21 nt, synthetic construct
  source 1..21: mol_type = other RNA
gaattgtcttgatcaattctg

SEQ ID NO: 7808 - RNA, 21 nt, synthetic construct
  source 1..21: mol_type = other RNA
gaattttttcttctaggaggc

SEQ ID NO: 7809 - RNA, 21 nt, synthetic construct
  source 1..21: mol_type = other RNA
gacaaagtctttaagaccatg

SEQ ID NO: 7810 - RNA, 21 nt, synthetic construct
  source 1..21: mol_type = other RNA
gacaattcatcatttgattct

SEQ ID NO: 7811 - RNA, 21 nt, synthetic construct
  source 1..21: mol_type = other RNA
gacatattctttacctcttca

SEQ ID NO: 7812 - RNA, 21 nt, synthetic construct
  source 1..21: mol_type = other RNA
gacatatttcaaaaactcaac

SEQ ID NO: 7813 - RNA, 21 nt, synthetic construct
  source 1..21: mol_type = other RNA
gacatggtcttaaagactttg

SEQ ID NO: 7814 - RNA, 21 nt, synthetic construct
  source 1..21: mol_type = other RNA
gaccatgtcccaactgaagga

SEQ ID NO: 7815 - RNA, 21 nt, synthetic construct
  source 1..21: mol_type = other RNA
gacgaagggccaaattaatga

SEQ ID NO: 7816 - RNA, 21 nt, synthetic construct
  source 1..21: mol_type = other RNA
gacgatgtaaaaattttagcc

SEQ ID NO: 7817 - RNA, 21 nt, synthetic construct
  source 1..21: mol_type = other RNA
gactgatcaaatatgttgagt

SEQ ID NO: 7818 - RNA, 21 nt, synthetic construct
  source 1..21: mol_type = other RNA
gacttgtagtttatatgtagt

SEQ ID NO: 7819 - RNA, 21 nt, synthetic construct
  source 1..21: mol_type = other RNA
gactttgtccataagacgaag

SEQ ID NO: 7820 - RNA, 21 nt, synthetic construct
  source 1..21: mol_type = other RNA
gagaagaactacatataaact

SEQ ID NO: 7821 - RNA, 21 nt, synthetic construct
  source 1..21: mol_type = other RNA
gagaatcaaatgatgaattgt

SEQ ID NO: 7822 - RNA, 21 nt, synthetic construct
  source 1..21: mol_type = other RNA
gagatagagaatcaaatgatg

SEQ ID NO: 7823 - RNA, 21 nt, synthetic construct
  source 1..21: mol_type = other RNA
gagcaactaactaacttaatt

SEQ ID NO: 7824 - RNA, 21 nt, synthetic construct
  source 1..21: mol_type = other RNA
gagccaaaatcaagatttgct

SEQ ID NO: 7825 - RNA, 21 nt, synthetic construct
  source 1..21: mol_type = other RNA
gaggaaataactagaggaaca

SEQ ID NO: 7826 - RNA, 21 nt, synthetic construct
  source 1..21: mol_type = other RNA
gaggaacaataaaaagaagga

SEQ ID NO: 7827 - RNA, 21 nt, synthetic construct
  source 1..21: mol_type = other RNA
gaggccattggctaaaatttt

SEQ ID NO: 7828 - RNA, 21 nt, synthetic construct
  source 1..21: mol_type = other RNA
gaggctttcaagttttgagtt

SEQ ID NO: 7829 - RNA, 21 nt, synthetic construct
  source 1..21: mol_type = other RNA
gaggtaaagaatatgtcactt

SEQ ID NO: 7830 - RNA, 21 nt, synthetic construct
  source 1..21: mol_type = other RNA
gagttcaagtgacatattctt

SEQ ID NO: 7831 - RNA, 21 nt, synthetic construct
  source 1..21: mol_type = other RNA
gagttgagttcaagtgacata

SEQ ID NO: 7832 - RNA, 21 nt, synthetic construct
  source 1..21: mol_type = other RNA
gagtttcaggttgattttgaa

SEQ ID NO: 7833 - RNA, 21 nt, synthetic construct
  source 1..21: mol_type = other RNA
gagtttttgaaatatgtcatt

SEQ ID NO: 7834 - RNA, 21 nt, synthetic construct
  source 1..21: mol_type = other RNA
gatagagaatcaaatgatgaa

SEQ ID NO: 7835 - RNA, 21 nt, synthetic construct
  source 1..21: mol_type = other RNA
gatagatcataaaaagactga

SEQ ID NO: 7836 - RNA, 21 nt, synthetic construct
  source 1..21: mol_type = other RNA
gatcaaatatgttgagttttt

SEQ ID NO: 7837 - RNA, 21 nt, synthetic construct
  source 1..21: mol_type = other RNA
gatcaagacaattcatcattt

SEQ ID NO: 7838 - RNA, 21 nt, synthetic construct
  source 1..21: mol_type = other RNA
gatcaattctggaggaaataa

SEQ ID NO: 7839 - RNA, 21 nt, synthetic construct
  source 1..21: mol_type = other RNA
gatcagtctttttatgatcta

SEQ ID NO: 7840 - RNA, 21 nt, synthetic construct
  source 1..21: mol_type = other RNA
gatcataaaaagactgatcaa

SEQ ID NO: 7841 - RNA, 21 nt, synthetic construct
  source 1..21: mol_type = other RNA
gatctatcgctgcaaaccagt

SEQ ID NO: 7842 - RNA, 21 nt, synthetic construct
  source 1..21: mol_type = other RNA
gatgaattgtcttgatcaatt

SEQ ID NO: 7843 - RNA, 21 nt, synthetic construct
  source 1..21: mol_type = other RNA
gatgtaaaaattttagccaat

SEQ ID NO: 7844 - RNA, 21 nt, synthetic construct
  source 1..21: mol_type = other RNA
gattctctatctccagagcca

SEQ ID NO: 7845 - RNA, 21 nt, synthetic construct
  source 1..21: mol_type = other RNA
gatttcactggtttgcagcga

SEQ ID NO: 7846 - RNA, 21 nt, synthetic construct
  source 1..21: mol_type = other RNA
gatttgctatgttagacgatg

SEQ ID NO: 7847 - RNA, 21 nt, synthetic construct
  source 1..21: mol_type = other RNA
gattttggctctggagataga

SEQ ID NO: 7848 - RNA, 21 nt, synthetic construct
  source 1..21: mol_type = other RNA
gcaaaccagtgaaatcaaaga

SEQ ID NO: 7849 - RNA, 21 nt, synthetic construct
  source 1..21: mol_type = other RNA
gcaaatcttgattttggctct

SEQ ID NO: 7850 - RNA, 21 nt, synthetic construct
  source 1..21: mol_type = other RNA
gcaactaactaacttaattca

SEQ ID NO: 7851 - RNA, 21 nt, synthetic construct
  source 1..21: mol_type = other RNA
gcagcgatagatcataaaaag

SEQ ID NO: 7852 - RNA, 21 nt, synthetic construct
  source 1..21: mol_type = other RNA
gccaaaatcaagatttgctat

SEQ ID NO: 7853 - RNA, 21 nt, synthetic construct
  source 1..21: mol_type = other RNA
gccaaattaatgacatatttc

SEQ ID NO: 7854 - RNA, 21 nt, synthetic construct
  source 1..21: mol_type = other RNA
gccaatggcctccttcagttg

SEQ ID NO: 7855 - RNA, 21 nt, synthetic construct
  source 1..21: mol_type = other RNA
gccattggctaaaatttttac

SEQ ID NO: 7856 - RNA, 21 nt, synthetic construct
  source 1..21: mol_type = other RNA
gcccttcgtcttatggacaaa

SEQ ID NO: 7857 - RNA, 21 nt, synthetic construct
  source 1..21: mol_type = other RNA
gcctcctagaagaaaaaattc

SEQ ID NO: 7858 - RNA, 21 nt, synthetic construct
  source 1..21: mol_type = other RNA
gcctccttcagttgggacatg

SEQ ID NO: 7859 - RNA, 21 nt, synthetic construct
  source 1..21: mol_type = other RNA
gcgatagatcataaaaagact

SEQ ID NO: 7860 - RNA, 21 nt, synthetic construct
  source 1..21: mol_type = other RNA
gctaaaatttttacatcgtct

SEQ ID NO: 7861 - RNA, 21 nt, synthetic construct
  source 1..21: mol_type = other RNA
gctatgttagacgatgtaaaa

SEQ ID NO: 7862 - RNA, 21 nt, synthetic construct
  source 1..21: mol_type = other RNA
gctccttctttttattgttcc

SEQ ID NO: 7863 - RNA, 21 nt, synthetic construct
  source 1..21: mol_type = other RNA
gctctggagatagagaatcaa

SEQ ID NO: 7864 - RNA, 21 nt, synthetic construct
  source 1..21: mol_type = other RNA
gctcttctaaatatttcactt

SEQ ID NO: 7865 - RNA, 21 nt, synthetic construct
  source 1..21: mol_type = other RNA
gctgcaaaccagtgaaatcaa

SEQ ID NO: 7866 - RNA, 21 nt, synthetic construct
  source 1..21: mol_type = other RNA
gctttcaagttttgagttgag

SEQ ID NO: 7867 - RNA, 21 nt, synthetic construct
  source 1..21: mol_type = other RNA
ggaaataactagaggaacaat

SEQ ID NO: 7868 - RNA, 21 nt, synthetic construct
  source 1..21: mol_type = other RNA
ggaacaataaaaagaaggagc

SEQ ID NO: 7869 - RNA, 21 nt, synthetic construct
  source 1..21: mol_type = other RNA
ggaactgagaagaactacata

SEQ ID NO: 7870 - RNA, 21 nt, synthetic construct
  source 1..21: mol_type = other RNA
ggacaaagtctttaagaccat

SEQ ID NO: 7871 - RNA, 21 nt, synthetic construct
  source 1..21: mol_type = other RNA
ggacatggtcttaaagacttt

SEQ ID NO: 7872 - RNA, 21 nt, synthetic construct
  source 1..21: mol_type = other RNA
ggagatagagaatcaaatgat

SEQ ID NO: 7873 - RNA, 21 nt, synthetic construct
  source 1..21: mol_type = other RNA
ggaggaaataactagaggaac

SEQ ID NO: 7874 - RNA, 21 nt, synthetic construct
  source 1..21: mol_type = other RNA
ggaggccattggctaaaattt

SEQ ID NO: 7875 - RNA, 21 nt, synthetic construct
  source 1..21: mol_type = other RNA
ggaggctttcaagttttgagt

SEQ ID NO: 7876 - RNA, 21 nt, synthetic construct
  source 1..21: mol_type = other RNA
ggagtttcaggttgattttga

SEQ ID NO: 7877 - RNA, 21 nt, synthetic construct
  source 1..21: mol_type = other RNA
ggccaaattaatgacatattt

SEQ ID NO: 7878 - RNA, 21 nt, synthetic construct
  source 1..21: mol_type = other RNA
ggccattggctaaaattttta

SEQ ID NO: 7879 - RNA, 21 nt, synthetic construct
  source 1..21: mol_type = other RNA
ggcccttcgtcttatggacaa

SEQ ID NO: 7880 - RNA, 21 nt, synthetic construct
  source 1..21: mol_type = other RNA
ggcctccttcagttgggacat

SEQ ID NO: 7881 - RNA, 21 nt, synthetic construct
  source 1..21: mol_type = other RNA
ggctaaaatttttacatcgtc

SEQ ID NO: 7882 - RNA, 21 nt, synthetic construct
  source 1..21: mol_type = other RNA
ggctctggagatagagaatca

SEQ ID NO: 7883 - RNA, 21 nt, synthetic construct
  source 1..21: mol_type = other RNA
ggctttcaagttttgagttga

SEQ ID NO: 7884 - RNA, 21 nt, synthetic construct
  source 1..21: mol_type = other RNA
gggacatggtcttaaagactt

SEQ ID NO: 7885 - RNA, 21 nt, synthetic construct
  source 1..21: mol_type = other RNA
gggccaaattaatgacatatt

SEQ ID NO: 7886 - RNA, 21 nt, synthetic construct
  source 1..21: mol_type = other RNA
gggtgttctggagtttcaggt

SEQ ID NO: 7887 - RNA, 21 nt, synthetic construct
  source 1..21: mol_type = other RNA
ggtaaagaatatgtcacttga

SEQ ID NO: 7888 - RNA, 21 nt, synthetic construct
  source 1..21: mol_type = other RNA
ggtcttaaagactttgtccat

SEQ ID NO: 7889 - RNA, 21 nt, synthetic construct
  source 1..21: mol_type = other RNA
ggtgttctggagtttcaggtt

SEQ ID NO: 7890 - RNA, 21 nt, synthetic construct
  source 1..21: mol_type = other RNA
ggttgattttgaattaagtta

SEQ ID NO: 7891 - RNA, 21 nt, synthetic construct
  source 1..21: mol_type = other RNA
ggtttgcagcgatagatcata

SEQ ID NO: 7892 - RNA, 21 nt, synthetic construct
  source 1..21: mol_type = other RNA
gtaaaaattttagccaatggc

SEQ ID NO: 7893 - RNA, 21 nt, synthetic construct
  source 1..21: mol_type = other RNA
gtaaagaatatgtcacttgaa

SEQ ID NO: 7894 - RNA, 21 nt, synthetic construct
  source 1..21: mol_type = other RNA
gtaacttcacttaaagtaagt

SEQ ID NO: 7895 - RNA, 21 nt, synthetic construct
  source 1..21: mol_type = other RNA
gtaagtagaaaataaagaggg

SEQ ID NO: 7896 - RNA, 21 nt, synthetic construct
  source 1..21: mol_type = other RNA
gtagaattttttcttctagga

SEQ ID NO: 7897 - RNA, 21 nt, synthetic construct
  source 1..21: mol_type = other RNA
gtagttcttctcagttccttt

SEQ ID NO: 7898 - RNA, 21 nt, synthetic construct
  source 1..21: mol_type = other RNA
gtagtttatatgtagttcttc

SEQ ID NO: 7899 - RNA, 21 nt, synthetic construct
  source 1..21: mol_type = other RNA
gtcaaaaatgaagaggtaaag

SEQ ID NO: 7900 - RNA, 21 nt, synthetic construct
  source 1..21: mol_type = other RNA
gtcacttgaactcaactcaaa

SEQ ID NO: 7901 - RNA, 21 nt, synthetic construct
  source 1..21: mol_type = other RNA
gtcattaatttggcccttcgt

SEQ ID NO: 7902 - RNA, 21 nt, synthetic construct
  source 1..21: mol_type = other RNA
gtccataagacgaagggccaa

SEQ ID NO: 7903 - RNA, 21 nt, synthetic construct
  source 1..21: mol_type = other RNA
gtcccaactgaaggaggccat

SEQ ID NO: 7904 - RNA, 21 nt, synthetic construct
  source 1..21: mol_type = other RNA
gtctaacatagcaaatcttga

SEQ ID NO: 7905 - RNA, 21 nt, synthetic construct
  source 1..21: mol_type = other RNA
gtcttaaagactttgtccata

SEQ ID NO: 7906 - RNA, 21 nt, synthetic construct
  source 1..21: mol_type = other RNA
gtcttatggacaaagtcttta

SEQ ID NO: 7907 - RNA, 21 nt, synthetic construct
  source 1..21: mol_type = other RNA
gtcttgatcaattctggagga

SEQ ID NO: 7908 - RNA, 21 nt, synthetic construct
  source 1..21: mol_type = other RNA
gtctttaagaccatgtcccaa

SEQ ID NO: 7909 - RNA, 21 nt, synthetic construct
  source 1..21: mol_type = other RNA
gtctttttatgatctatcgct

SEQ ID NO: 7910 - RNA, 21 nt, synthetic construct
  source 1..21: mol_type = other RNA
gtgaaatatttagaagagcaa

SEQ ID NO: 7911 - RNA, 21 nt, synthetic construct
  source 1..21: mol_type = other RNA
gtgaaatcaaagaagaagaaa

SEQ ID NO: 7912 - RNA, 21 nt, synthetic construct
  source 1..21: mol_type = other RNA
gtgaagttacttctgggtgtt

SEQ ID NO: 7913 - RNA, 21 nt, synthetic construct
  source 1..21: mol_type = other RNA
gtgacatattctttacctctt

SEQ ID NO: 7914 - RNA, 21 nt, synthetic construct
  source 1..21: mol_type = other RNA
gtgttctggagtttcaggttg

SEQ ID NO: 7915 - RNA, 21 nt, synthetic construct
  source 1..21: mol_type = other RNA
gttacttctgggtgttctgga

SEQ ID NO: 7916 - RNA, 21 nt, synthetic construct
  source 1..21: mol_type = other RNA
gttagacgatgtaaaaatttt

SEQ ID NO: 7917 - RNA, 21 nt, synthetic construct
  source 1..21: mol_type = other RNA
gttagttagttgctcttctaa

SEQ ID NO: 7918 - RNA, 21 nt, synthetic construct
  source 1..21: mol_type = other RNA
gttagttgctcttctaaatat

SEQ ID NO: 7919 - RNA, 21 nt, synthetic construct
  source 1..21: mol_type = other RNA
gttatttcctccagaattgat

SEQ ID NO: 7920 - RNA, 21 nt, synthetic construct
  source 1..21: mol_type = other RNA
gttcaagtgacatattcttta

SEQ ID NO: 7921 - RNA, 21 nt, synthetic construct
  source 1..21: mol_type = other RNA
gttcacaattaagctccttct

SEQ ID NO: 7922 - RNA, 21 nt, synthetic construct
  source 1..21: mol_type = other RNA
gttcctctagttatttcctcc

SEQ ID NO: 7923 - RNA, 21 nt, synthetic construct
  source 1..21: mol_type = other RNA
gttccttttcttcttctttga

SEQ ID NO: 7924 - RNA, 21 nt, synthetic construct
  source 1..21: mol_type = other RNA
gttctggagtttcaggttgat

SEQ ID NO: 7925 - RNA, 21 nt, synthetic construct
  source 1..21: mol_type = other RNA
gttcttctcagttccttttct

SEQ ID NO: 7926 - RNA, 21 nt, synthetic construct
  source 1..21: mol_type = other RNA
gttgaagtagaattttttctt

SEQ ID NO: 7927 - RNA, 21 nt, synthetic construct
  source 1..21: mol_type = other RNA
gttgagttcaagtgacatatt

SEQ ID NO: 7928 - RNA, 21 nt, synthetic construct
  source 1..21: mol_type = other RNA
gttgagtttttgaaatatgtc

SEQ ID NO: 7929 - RNA, 21 nt, synthetic construct
  source 1..21: mol_type = other RNA
gttgattttgaattaagttag

SEQ ID NO: 7930 - RNA, 21 nt, synthetic construct
  source 1..21: mol_type = other RNA
gttgctcttctaaatatttca

SEQ ID NO: 7931 - RNA, 21 nt, synthetic construct
  source 1..21: mol_type = other RNA
gttgggacatggtcttaaaga

SEQ ID NO: 7932 - RNA, 21 nt, synthetic construct
  source 1..21: mol_type = other RNA
gtttatatgtagttcttctca

SEQ ID NO: 7933 - RNA, 21 nt, synthetic construct
  source 1..21: mol_type = other RNA
gtttcaggttgattttgaatt

SEQ ID NO: 7934 - RNA, 21 nt, synthetic construct
  source 1..21: mol_type = other RNA
gtttgcagcgatagatcataa

SEQ ID NO: 7935 - RNA, 21 nt, synthetic construct
  source 1..21: mol_type = other RNA
gttttgagttgagttcaagtg

SEQ ID NO: 7936 - RNA, 21 nt, synthetic construct
  source 1..21: mol_type = other RNA
taaaaagaaggagcttaattg

SEQ ID NO: 7937 - RNA, 21 nt, synthetic construct
  source 1..21: mol_type = other RNA
taaaaagactgatcaaatatg

SEQ ID NO: 7938 - RNA, 21 nt, synthetic construct
  source 1..21: mol_type = other RNA
taaaaattttagccaatggcc

SEQ ID NO: 7939 - RNA, 21 nt, synthetic construct
  source 1..21: mol_type = other RNA
taaactacaagtcaaaaatga

SEQ ID NO: 7940 - RNA, 21 nt, synthetic construct
  source 1..21: mol_type = other RNA
taaagaatatgtcacttgaac

SEQ ID NO: 7941 - RNA, 21 nt, synthetic construct
  source 1..21: mol_type = other RNA
taaagactttgtccataagac

SEQ ID NO: 7942 - RNA, 21 nt, synthetic construct
  source 1..21: mol_type = other RNA
taacatagcaaatcttgattt

SEQ ID NO: 7943 - RNA, 21 nt, synthetic construct
  source 1..21: mol_type = other RNA
taactagaggaacaataaaaa

SEQ ID NO: 7944 - RNA, 21 nt, synthetic construct
  source 1..21: mol_type = other RNA
taacttaattcaaaatcaacc

SEQ ID NO: 7945 - RNA, 21 nt, synthetic construct
  source 1..21: mol_type = other RNA
taacttcacttaaagtaagta

SEQ ID NO: 7946 - RNA, 21 nt, synthetic construct
  source 1..21: mol_type = other RNA
taagaccatgtcccaactgaa

SEQ ID NO: 7947 - RNA, 21 nt, synthetic construct
  source 1..21: mol_type = other RNA
taagacgaagggccaaattaa

SEQ ID NO: 7948 - RNA, 21 nt, synthetic construct
  source 1..21: mol_type = other RNA
taagctccttctttttattgt

SEQ ID NO: 7949 - RNA, 21 nt, synthetic construct
  source 1..21: mol_type = other RNA
taagtagaaaataaagagggt

SEQ ID NO: 7950 - RNA, 21 nt, synthetic construct
  source 1..21: mol_type = other RNA
taagtgaagttacttctgggt

SEQ ID NO: 7951 - RNA, 21 nt, synthetic construct
  source 1..21: mol_type = other RNA
taagttagttagttgctcttc

SEQ ID NO: 7952 - RNA, 21 nt, synthetic construct
  source 1..21: mol_type = other RNA
taattcaaaatcaacctgaaa

SEQ ID NO: 7953 - RNA, 21 nt, synthetic construct
  source 1..21: mol_type = other RNA
taatttggcccttcgtcttat

SEQ ID NO: 7954 - RNA, 21 nt, synthetic construct
  source 1..21: mol_type = other RNA
tacaagtcaaaaatgaagagg

SEQ ID NO: 7955 - RNA, 21 nt, synthetic construct
  source 1..21: mol_type = other RNA
tacatataaactacaagtcaa

SEQ ID NO: 7956 - RNA, 21 nt, synthetic construct
  source 1..21: mol_type = other RNA
tacatcgtctaacatagcaaa

SEQ ID NO: 7957 - RNA, 21 nt, synthetic construct
  source 1..21: mol_type = other RNA
tacctcttcatttttgacttg

SEQ ID NO: 7958 - RNA, 21 nt, synthetic construct
  source 1..21: mol_type = other RNA
tacttactttaagtgaagtta

SEQ ID NO: 7959 - RNA, 21 nt, synthetic construct
  source 1..21: mol_type = other RNA
tacttcaacaaaaagtgaaat

SEQ ID NO: 7960 - RNA, 21 nt, synthetic construct
  source 1..21: mol_type = other RNA
tacttctgggtgttctggagt

SEQ ID NO: 7961 - RNA, 21 nt, synthetic construct
  source 1..21: mol_type = other RNA
tactttaagtgaagttacttc

SEQ ID NO: 7962 - RNA, 21 nt, synthetic construct
  source 1..21: mol_type = other RNA
tagaagaaaaaattctacttc

SEQ ID NO: 7963 - RNA, 21 nt, synthetic construct
  source 1..21: mol_type = other RNA
tagaagagcaactaactaact

SEQ ID NO: 7964 - RNA, 21 nt, synthetic construct
  source 1..21: mol_type = other RNA
tagaattttttcttctaggag

SEQ ID NO: 7965 - RNA, 21 nt, synthetic construct
  source 1..21: mol_type = other RNA
tagacgatgtaaaaattttag

SEQ ID NO: 7966 - RNA, 21 nt, synthetic construct
  source 1..21: mol_type = other RNA
tagagaatcaaatgatgaatt

SEQ ID NO: 7967 - RNA, 21 nt, synthetic construct
  source 1..21: mol_type = other RNA
tagaggaacaataaaaagaag

SEQ ID NO: 7968 - RNA, 21 nt, synthetic construct
  source 1..21: mol_type = other RNA
tagatcataaaaagactgatc

SEQ ID NO: 7969 - RNA, 21 nt, synthetic construct
  source 1..21: mol_type = other RNA
tagcaaatcttgattttggct

SEQ ID NO: 7970 - RNA, 21 nt, synthetic construct
  source 1..21: mol_type = other RNA
tagccaatggcctccttcagt

SEQ ID NO: 7971 - RNA, 21 nt, synthetic construct
  source 1..21: mol_type = other RNA
taggaggctttcaagttttga

SEQ ID NO: 7972 - RNA, 21 nt, synthetic construct
  source 1..21: mol_type = other RNA
tagttagttgctcttctaaat

SEQ ID NO: 7973 - RNA, 21 nt, synthetic construct
  source 1..21: mol_type = other RNA
tagttatttcctccagaattg

SEQ ID NO: 7974 - RNA, 21 nt, synthetic construct
  source 1..21: mol_type = other RNA
tagttcttctcagttcctttt

SEQ ID NO: 7975 - RNA, 21 nt, synthetic construct
  source 1..21: mol_type = other RNA
tagttgctcttctaaatattt

SEQ ID NO: 7976 - RNA, 21 nt, synthetic construct
  source 1..21: mol_type = other RNA
tagtttatatgtagttcttct

SEQ ID NO: 7977 - RNA, 21 nt, synthetic construct
  source 1..21: mol_type = other RNA
tatatgtagttcttctcagtt

SEQ ID NO: 7978 - RNA, 21 nt, synthetic construct
  source 1..21: mol_type = other RNA
tatcgctgcaaaccagtgaaa

SEQ ID NO: 7979 - RNA, 21 nt, synthetic construct
  source 1..21: mol_type = other RNA
tatctccagagccaaaatcaa

SEQ ID NO: 7980 - RNA, 21 nt, synthetic construct
  source 1..21: mol_type = other RNA
tatgatctatcgctgcaaacc

SEQ ID NO: 7981 - RNA, 21 nt, synthetic construct
  source 1..21: mol_type = other RNA
tatggacaaagtctttaagac

SEQ ID NO: 7982 - RNA, 21 nt, synthetic construct
  source 1..21: mol_type = other RNA
tatgtagttcttctcagttcc

SEQ ID NO: 7983 - RNA, 21 nt, synthetic construct
  source 1..21: mol_type = other RNA
tatgtcacttgaactcaactc

SEQ ID NO: 7984 - RNA, 21 nt, synthetic construct
  source 1..21: mol_type = other RNA
tatgtcattaatttggccctt

SEQ ID NO: 7985 - RNA, 21 nt, synthetic construct
  source 1..21: mol_type = other RNA
tatgttagacgatgtaaaaat

SEQ ID NO: 7986 - RNA, 21 nt, synthetic construct
  source 1..21: mol_type = other RNA
tattctttacctcttcatttt

SEQ ID NO: 7987 - RNA, 21 nt, synthetic construct
  source 1..21: mol_type = other RNA
tattgttcctctagttatttc

SEQ ID NO: 7988 - RNA, 21 nt, synthetic construct
  source 1..21: mol_type = other RNA
tatttagaagagcaactaact

SEQ ID NO: 7989 - RNA, 21 nt, synthetic construct
  source 1..21: mol_type = other RNA
tatttcactttttgttgaagt

SEQ ID NO: 7990 - RNA, 21 nt, synthetic construct
  source 1..21: mol_type = other RNA
tatttcctccagaattgatca

SEQ ID NO: 7991 - RNA, 21 nt, synthetic construct
  source 1..21: mol_type = other RNA
tatttgatcagtctttttatg

SEQ ID NO: 7992 - RNA, 21 nt, synthetic construct
  source 1..21: mol_type = other RNA
tcaaaaactcaacatatttga

SEQ ID NO: 7993 - RNA, 21 nt, synthetic construct
  source 1..21: mol_type = other RNA
tcaaaaatgaagaggtaaaga

SEQ ID NO: 7994 - RNA, 21 nt, synthetic construct
  source 1..21: mol_type = other RNA
tcaaaacttgaaagcctccta

SEQ ID NO: 7995 - RNA, 21 nt, synthetic construct
  source 1..21: mol_type = other RNA
tcaaaatcaacctgaaactcc

SEQ ID NO: 7996 - RNA, 21 nt, synthetic construct
  source 1..21: mol_type = other RNA
tcaaagaagaagaaaaggaac

SEQ ID NO: 7997 - RNA, 21 nt, synthetic construct
  source 1..21: mol_type = other RNA
tcaaatatgttgagtttttga

SEQ ID NO: 7998 - RNA, 21 nt, synthetic construct
  source 1..21: mol_type = other RNA
tcaaatgatgaattgtcttga

SEQ ID NO: 7999 - RNA, 21 nt, synthetic construct
  source 1..21: mol_type = other RNA
tcaacatatttgatcagtctt

SEQ ID NO: 8000 - RNA, 21 nt, synthetic construct
  source 1..21: mol_type = other RNA
tcaacctgaaactccagaaca

SEQ ID NO: 8001 - RNA, 21 nt, synthetic construct
  source 1..21: mol_type = other RNA
tcaactcaaaacttgaaagcc

SEQ ID NO: 8002 - RNA, 21 nt, synthetic construct
  source 1..21: mol_type = other RNA
tcaagacaattcatcatttga

SEQ ID NO: 8003 - RNA, 21 nt, synthetic construct
  source 1..21: mol_type = other RNA
tcaagatttgctatgttagac

SEQ ID NO: 8004 - RNA, 21 nt, synthetic construct
  source 1..21: mol_type = other RNA
tcaagtgacatattctttacc

SEQ ID NO: 8005 - RNA, 21 nt, synthetic construct
  source 1..21: mol_type = other RNA
tcaagttttgagttgagttca

SEQ ID NO: 8006 - RNA, 21 nt, synthetic construct
  source 1..21: mol_type = other RNA
tcaattctggaggaaataact

SEQ ID NO: 8007 - RNA, 21 nt, synthetic construct
  source 1..21: mol_type = other RNA
tcacaattaagctccttcttt

SEQ ID NO: 8008 - RNA, 21 nt, synthetic construct
  source 1..21: mol_type = other RNA
tcactggtttgcagcgataga

SEQ ID NO: 8009 - RNA, 21 nt, synthetic construct
  source 1..21: mol_type = other RNA
tcacttaaagtaagtagaaaa

SEQ ID NO: 8010 - RNA, 21 nt, synthetic construct
  source 1..21: mol_type = other RNA
tcacttgaactcaactcaaaa

SEQ ID NO: 8011 - RNA, 21 nt, synthetic construct
  source 1..21: mol_type = other RNA
tcactttttgttgaagtagaa

SEQ ID NO: 8012 - RNA, 21 nt, synthetic construct
  source 1..21: mol_type = other RNA
tcaggttgattttgaattaag

SEQ ID NO: 8013 - RNA, 21 nt, synthetic construct
  source 1..21: mol_type = other RNA
tcagtctttttatgatctatc

SEQ ID NO: 8014 - RNA, 21 nt, synthetic construct
  source 1..21: mol_type = other RNA
tcagttccttttcttcttctt

SEQ ID NO: 8015 - RNA, 21 nt, synthetic construct
  source 1..21: mol_type = other RNA
tcagttgggacatggtcttaa

SEQ ID NO: 8016 - RNA, 21 nt, synthetic construct
  source 1..21: mol_type = other RNA
tcataaaaagactgatcaaat

SEQ ID NO: 8017 - RNA, 21 nt, synthetic construct
  source 1..21: mol_type = other RNA
tcatcatttgattctctatct

SEQ ID NO: 8018 - RNA, 21 nt, synthetic construct
  source 1..21: mol_type = other RNA
tcattaatttggcccttcgtc

SEQ ID NO: 8019 - RNA, 21 nt, synthetic construct
  source 1..21: mol_type = other RNA
tcatttgattctctatctcca

SEQ ID NO: 8020 - RNA, 21 nt, synthetic construct
  source 1..21: mol_type = other RNA
tcatttttgacttgtagttta

SEQ ID NO: 8021 - RNA, 21 nt, synthetic construct
  source 1..21: mol_type = other RNA
tccagaacacccagaagtaac

SEQ ID NO: 8022 - RNA, 21 nt, synthetic construct
  source 1..21: mol_type = other RNA
tccagaattgatcaagacaat

SEQ ID NO: 8023 - RNA, 21 nt, synthetic construct
  source 1..21: mol_type = other RNA
tccagagccaaaatcaagatt

SEQ ID NO: 8024 - RNA, 21 nt, synthetic construct
  source 1..21: mol_type = other RNA
tccataagacgaagggccaaa

SEQ ID NO: 8025 - RNA, 21 nt, synthetic construct
  source 1..21: mol_type = other RNA
tcccaactgaaggaggccatt

SEQ ID NO: 8026 - RNA, 21 nt, synthetic construct
  source 1..21: mol_type = other RNA
tcctagaagaaaaaattctac

SEQ ID NO: 8027 - RNA, 21 nt, synthetic construct
  source 1..21: mol_type = other RNA
tcctccagaattgatcaagac

SEQ ID NO: 8028 - RNA, 21 nt, synthetic construct
  source 1..21: mol_type = other RNA
tcctctagttatttcctccag

SEQ ID NO: 8029 - RNA, 21 nt, synthetic construct
  source 1..21: mol_type = other RNA
tccttcagttgggacatggtc

SEQ ID NO: 8030 - RNA, 21 nt, synthetic construct
  source 1..21: mol_type = other RNA
tccttctttttattgttcctc

SEQ ID NO: 8031 - RNA, 21 nt, synthetic construct
  source 1..21: mol_type = other RNA
tccttttcttcttctttgatt

SEQ ID NO: 8032 - RNA, 21 nt, synthetic construct
  source 1..21: mol_type = other RNA
tcgctgcaaaccagtgaaatc

SEQ ID NO: 8033 - RNA, 21 nt, synthetic construct
  source 1..21: mol_type = other RNA
tcgtctaacatagcaaatctt

SEQ ID NO: 8034 - RNA, 21 nt, synthetic construct
  source 1..21: mol_type = other RNA
tcgtcttatggacaaagtctt

SEQ ID NO: 8035 - RNA, 21 nt, synthetic construct
  source 1..21: mol_type = other RNA
tctaacatagcaaatcttgat

SEQ ID NO: 8036 - RNA, 21 nt, synthetic construct
  source 1..21: mol_type = other RNA
tctacttactttaagtgaagt

SEQ ID NO: 8037 - RNA, 21 nt, synthetic construct
  source 1..21: mol_type = other RNA
tctacttcaacaaaaagtgaa

SEQ ID NO: 8038 - RNA, 21 nt, synthetic construct
  source 1..21: mol_type = other RNA
tctaggaggctttcaagtttt

SEQ ID NO: 8039 - RNA, 21 nt, synthetic construct
  source 1..21: mol_type = other RNA
tctagttatttcctccagaat

SEQ ID NO: 8040 - RNA, 21 nt, synthetic construct
  source 1..21: mol_type = other RNA
tctatcgctgcaaaccagtga

SEQ ID NO: 8041 - RNA, 21 nt, synthetic construct
  source 1..21: mol_type = other RNA
tctatctccagagccaaaatc

SEQ ID NO: 8042 - RNA, 21 nt, synthetic construct
  source 1..21: mol_type = other RNA
tctcagttccttttcttcttc

SEQ ID NO: 8043 - RNA, 21 nt, synthetic construct
  source 1..21: mol_type = other RNA
tctccagagccaaaatcaaga

SEQ ID NO: 8044 - RNA, 21 nt, synthetic construct
  source 1..21: mol_type = other RNA
tctctatctccagagccaaaa

SEQ ID NO: 8045 - RNA, 21 nt, synthetic construct
  source 1..21: mol_type = other RNA
tctggagatagagaatcaaat

SEQ ID NO: 8046 - RNA, 21 nt, synthetic construct
  source 1..21: mol_type = other RNA
tctggaggaaataactagagg

SEQ ID NO: 8047 - RNA, 21 nt, synthetic construct
  source 1..21: mol_type = other RNA
tctggagtttcaggttgattt

SEQ ID NO: 8048 - RNA, 21 nt, synthetic construct
  source 1..21: mol_type = other RNA
tctgggtgttctggagtttca

SEQ ID NO: 8049 - RNA, 21 nt, synthetic construct
  source 1..21: mol_type = other RNA
tcttaaagactttgtccataa

SEQ ID NO: 8050 - RNA, 21 nt, synthetic construct
  source 1..21: mol_type = other RNA
tcttatggacaaagtctttaa

SEQ ID NO: 8051 - RNA, 21 nt, synthetic construct
  source 1..21: mol_type = other RNA
tcttcatttttgacttgtagt

SEQ ID NO: 8052 - RNA, 21 nt, synthetic construct
  source 1..21: mol_type = other RNA
tcttctaggaggctttcaagt

SEQ ID NO: 8053 - RNA, 21 nt, synthetic construct
  source 1..21: mol_type = other RNA
tcttctcagttccttttcttc

SEQ ID NO: 8054 - RNA, 21 nt, synthetic construct
  source 1..21: mol_type = other RNA
tcttcttctttgatttcactg

SEQ ID NO: 8055 - RNA, 21 nt, synthetic construct
  source 1..21: mol_type = other RNA
tcttctttgatttcactggtt

SEQ ID NO: 8056 - RNA, 21 nt, synthetic construct
  source 1..21: mol_type = other RNA
tcttgatcaattctggaggaa

SEQ ID NO: 8057 - RNA, 21 nt, synthetic construct
  source 1..21: mol_type = other RNA
tcttgattttggctctggaga

SEQ ID NO: 8058 - RNA, 21 nt, synthetic construct
  source 1..21: mol_type = other RNA
tctttaagaccatgtcccaac

SEQ ID NO: 8059 - RNA, 21 nt, synthetic construct
  source 1..21: mol_type = other RNA
tctttacctcttcatttttga

SEQ ID NO: 8060 - RNA, 21 nt, synthetic construct
  source 1..21: mol_type = other RNA
tctttgatttcactggtttgc

SEQ ID NO: 8061 - RNA, 21 nt, synthetic construct
  source 1..21: mol_type = other RNA
tctttttatgatctatcgctg

SEQ ID NO: 8062 - RNA, 21 nt, synthetic construct
  source 1..21: mol_type = other RNA
tctttttattgttcctctagt

SEQ ID NO: 8063 - RNA, 21 nt, synthetic construct
  source 1..21: mol_type = other RNA
tgaaactccagaacacccaga

SEQ ID NO: 8064 - RNA, 21 nt, synthetic construct
  source 1..21: mol_type = other RNA
tgaaagcctcctagaagaaaa

SEQ ID NO: 8065 - RNA, 21 nt, synthetic construct
  source 1..21: mol_type = other RNA
tgaaatatgtcattaatttgg

SEQ ID NO: 8066 - RNA, 21 nt, synthetic construct
  source 1..21: mol_type = other RNA
tgaaatatttagaagagcaac

SEQ ID NO: 8067 - RNA, 21 nt, synthetic construct
  source 1..21: mol_type = other RNA
tgaaatcaaagaagaagaaaa

SEQ ID NO: 8068 - RNA, 21 nt, synthetic construct
  source 1..21: mol_type = other RNA
tgaaccctctttattttctac

SEQ ID NO: 8069 - RNA, 21 nt, synthetic construct
  source 1..21: mol_type = other RNA
tgaactcaactcaaaacttga

SEQ ID NO: 8070 - RNA, 21 nt, synthetic construct
  source 1..21: mol_type = other RNA
tgaagaggtaaagaatatgtc

SEQ ID NO: 8071 - RNA, 21 nt, synthetic construct
  source 1..21: mol_type = other RNA
tgaaggaggccattggctaaa

SEQ ID NO: 8072 - RNA, 21 nt, synthetic construct
  source 1..21: mol_type = other RNA
tgaagtagaattttttcttct

SEQ ID NO: 8073 - RNA, 21 nt, synthetic construct
  source 1..21: mol_type = other RNA
tgaagttacttctgggtgttc

SEQ ID NO: 8074 - RNA, 21 nt, synthetic construct
  source 1..21: mol_type = other RNA
tgaattaagttagttagttgc

SEQ ID NO: 8075 - RNA, 21 nt, synthetic construct
  source 1..21: mol_type = other RNA
tgaattgtcttgatcaattct

SEQ ID NO: 8076 - RNA, 21 nt, synthetic construct
  source 1..21: mol_type = other RNA
tgacatattctttacctcttc

SEQ ID NO: 8077 - RNA, 21 nt, synthetic construct
  source 1..21: mol_type = other RNA
tgacatatttcaaaaactcaa

SEQ ID NO: 8078 - RNA, 21 nt, synthetic construct
  source 1..21: mol_type = other RNA
tgacttgtagtttatatgtag

SEQ ID NO: 8079 - RNA, 21 nt, synthetic construct
  source 1..21: mol_type = other RNA
tgagaagaactacatataaac

SEQ ID NO: 8080 - RNA, 21 nt, synthetic construct
  source 1..21: mol_type = other RNA
tgagttcaagtgacatattct

SEQ ID NO: 8081 - RNA, 21 nt, synthetic construct
  source 1..21: mol_type = other RNA
tgagttgagttcaagtgacat

SEQ ID NO: 8082 - RNA, 21 nt, synthetic construct
  source 1..21: mol_type = other RNA
tgagtttttgaaatatgtcat

SEQ ID NO: 8083 - RNA, 21 nt, synthetic construct
  source 1..21: mol_type = other RNA
tgatcaaatatgttgagtttt

SEQ ID NO: 8084 - RNA, 21 nt, synthetic construct
  source 1..21: mol_type = other RNA
tgatcaagacaattcatcatt

SEQ ID NO: 8085 - RNA, 21 nt, synthetic construct
  source 1..21: mol_type = other RNA
tgatcaattctggaggaaata

SEQ ID NO: 8086 - RNA, 21 nt, synthetic construct
  source 1..21: mol_type = other RNA
tgatcagtctttttatgatct

SEQ ID NO: 8087 - RNA, 21 nt, synthetic construct
  source 1..21: mol_type = other RNA
tgatctatcgctgcaaaccag

SEQ ID NO: 8088 - RNA, 21 nt, synthetic construct
  source 1..21: mol_type = other RNA
tgatgaattgtcttgatcaat

SEQ ID NO: 8089 - RNA, 21 nt, synthetic construct
  source 1..21: mol_type = other RNA
tgattctctatctccagagcc

SEQ ID NO: 8090 - RNA, 21 nt, synthetic construct
  source 1..21: mol_type = other RNA
tgatttcactggtttgcagcg

SEQ ID NO: 8091 - RNA, 21 nt, synthetic construct
  source 1..21: mol_type = other RNA
tgattttggctctggagatag

SEQ ID NO: 8092 - RNA, 21 nt, synthetic construct
  source 1..21: mol_type = other RNA
tgcaaaccagtgaaatcaaag

SEQ ID NO: 8093 - RNA, 21 nt, synthetic construct
  source 1..21: mol_type = other RNA
tgcagcgatagatcataaaaa

SEQ ID NO: 8094 - RNA, 21 nt, synthetic construct
  source 1..21: mol_type = other RNA
tgctatgttagacgatgtaaa

SEQ ID NO: 8095 - RNA, 21 nt, synthetic construct
  source 1..21: mol_type = other RNA
tgctcttctaaatatttcact

SEQ ID NO: 8096 - RNA, 21 nt, synthetic construct
  source 1..21: mol_type = other RNA
tggacaaagtctttaagacca

SEQ ID NO: 8097 - RNA, 21 nt, synthetic construct
  source 1..21: mol_type = other RNA
tggagatagagaatcaaatga

SEQ ID NO: 8098 - RNA, 21 nt, synthetic construct
  source 1..21: mol_type = other RNA
tggaggaaataactagaggaa

SEQ ID NO: 8099 - RNA, 21 nt, synthetic construct
  source 1..21: mol_type = other RNA
tggagtttcaggttgattttg

SEQ ID NO: 8100 - RNA, 21 nt, synthetic construct
  source 1..21: mol_type = other RNA
tggcccttcgtcttatggaca

SEQ ID NO: 8101 - RNA, 21 nt, synthetic construct
  source 1..21: mol_type = other RNA
tggcctccttcagttgggaca

SEQ ID NO: 8102 - RNA, 21 nt, synthetic construct
  source 1..21: mol_type = other RNA
tggctaaaatttttacatcgt

SEQ ID NO: 8103 - RNA, 21 nt, synthetic construct
  source 1..21: mol_type = other RNA
tggctctggagatagagaatc

SEQ ID NO: 8104 - RNA, 21 nt, synthetic construct
  source 1..21: mol_type = other RNA
tgggacatggtcttaaagact

SEQ ID NO: 8105 - RNA, 21 nt, synthetic construct
  source 1..21: mol_type = other RNA
tgggtgttctggagtttcagg

SEQ ID NO: 8106 - RNA, 21 nt, synthetic construct
  source 1..21: mol_type = other RNA
tggtcttaaagactttgtcca

SEQ ID NO: 8107 - RNA, 21 nt, synthetic construct
  source 1..21: mol_type = other RNA
tggtttgcagcgatagatcat

SEQ ID NO: 8108 - RNA, 21 nt, synthetic construct
  source 1..21: mol_type = other RNA
tgtaaaaattttagccaatgg

SEQ ID NO: 8109 - RNA, 21 nt, synthetic construct
  source 1..21: mol_type = other RNA
tgtagttcttctcagttcctt

SEQ ID NO: 8110 - RNA, 21 nt, synthetic construct
  source 1..21: mol_type = other RNA
tgtagtttatatgtagttctt

SEQ ID NO: 8111 - RNA, 21 nt, synthetic construct
  source 1..21: mol_type = other RNA
tgtcacttgaactcaactcaa

SEQ ID NO: 8112 - RNA, 21 nt, synthetic construct
  source 1..21: mol_type = other RNA
tgtcattaatttggcccttcg

SEQ ID NO: 8113 - RNA, 21 nt, synthetic construct
  source 1..21: mol_type = other RNA
tgtccataagacgaagggcca

SEQ ID NO: 8114 - RNA, 21 nt, synthetic construct
  source 1..21: mol_type = other RNA
tgtcccaactgaaggaggcca

SEQ ID NO: 8115 - RNA, 21 nt, synthetic construct
  source 1..21: mol_type = other RNA
tgtcttgatcaattctggagg

SEQ ID NO: 8116 - RNA, 21 nt, synthetic construct
  source 1..21: mol_type = other RNA
tgttagacgatgtaaaaattt

SEQ ID NO: 8117 - RNA, 21 nt, synthetic construct
  source 1..21: mol_type = other RNA
tgttcacaattaagctccttc

SEQ ID NO: 8118 - RNA, 21 nt, synthetic construct
  source 1..21: mol_type = other RNA
tgttcctctagttatttcctc

SEQ ID NO: 8119 - RNA, 21 nt, synthetic construct
  source 1..21: mol_type = other RNA
tgttctggagtttcaggttga

SEQ ID NO: 8120 - RNA, 21 nt, synthetic construct
  source 1..21: mol_type = other RNA
tgttgaagtagaattttttct

SEQ ID NO: 8121 - RNA, 21 nt, synthetic construct
  source 1..21: mol_type = other RNA
tgttgagtttttgaaatatgt

SEQ ID NO: 8122 - RNA, 21 nt, synthetic construct
  source 1..21: mol_type = other RNA
ttaaagactttgtccataaga

SEQ ID NO: 8123 - RNA, 21 nt, synthetic construct
  source 1..21: mol_type = other RNA
ttaagaccatgtcccaactga

SEQ ID NO: 8124 - RNA, 21 nt, synthetic construct
  source 1..21: mol_type = other RNA
ttaagctccttctttttattg

SEQ ID NO: 8125 - RNA, 21 nt, synthetic construct
  source 1..21: mol_type = other RNA
ttaagtgaagttacttctggg

SEQ ID NO: 8126 - RNA, 21 nt, synthetic construct
  source 1..21: mol_type = other RNA
ttaagttagttagttgctctt

SEQ ID NO: 8127 - RNA, 21 nt, synthetic construct
  source 1..21: mol_type = other RNA
ttaattcaaaatcaacctgaa

SEQ ID NO: 8128 - RNA, 21 nt, synthetic construct
  source 1..21: mol_type = other RNA
ttaatttggcccttcgtctta

SEQ ID NO: 8129 - RNA, 21 nt, synthetic construct
  source 1..21: mol_type = other RNA
ttacatcgtctaacatagcaa

SEQ ID NO: 8130 - RNA, 21 nt, synthetic construct
  source 1..21: mol_type = other RNA
ttacctcttcatttttgactt

SEQ ID NO: 8131 - RNA, 21 nt, synthetic construct
  source 1..21: mol_type = other RNA
ttacttctgggtgttctggag

SEQ ID NO: 8132 - RNA, 21 nt, synthetic construct
  source 1..21: mol_type = other RNA
ttactttaagtgaagttactt

SEQ ID NO: 8133 - RNA, 21 nt, synthetic construct
  source 1..21: mol_type = other RNA
ttagaagagcaactaactaac

SEQ ID NO: 8134 - RNA, 21 nt, synthetic construct
  source 1..21: mol_type = other RNA
ttagccaatggcctccttcag

SEQ ID NO: 8135 - RNA, 21 nt, synthetic construct
  source 1..21: mol_type = other RNA
ttagttagttgctcttctaaa

SEQ ID NO: 8136 - RNA, 21 nt, synthetic construct
  source 1..21: mol_type = other RNA
ttagttgctcttctaaatatt

SEQ ID NO: 8137 - RNA, 21 nt, synthetic construct
  source 1..21: mol_type = other RNA
ttatatgtagttcttctcagt

SEQ ID NO: 8138 - RNA, 21 nt, synthetic construct
  source 1..21: mol_type = other RNA
ttatgatctatcgctgcaaac

SEQ ID NO: 8139 - RNA, 21 nt, synthetic construct
  source 1..21: mol_type = other RNA
ttatggacaaagtctttaaga

SEQ ID NO: 8140 - RNA, 21 nt, synthetic construct
  source 1..21: mol_type = other RNA
ttattgttcctctagttattt

SEQ ID NO: 8141 - RNA, 21 nt, synthetic construct
  source 1..21: mol_type = other RNA
ttatttcctccagaattgatc

SEQ ID NO: 8142 - RNA, 21 nt, synthetic construct
  source 1..21: mol_type = other RNA
ttcaaaaactcaacatatttg

SEQ ID NO: 8143 - RNA, 21 nt, synthetic construct
  source 1..21: mol_type = other RNA
ttcaaaatcaacctgaaactc

SEQ ID NO: 8144 - RNA, 21 nt, synthetic construct
  source 1..21: mol_type = other RNA
ttcaagtgacatattctttac

SEQ ID NO: 8145 - RNA, 21 nt, synthetic construct
  source 1..21: mol_type = other RNA
ttcaagttttgagttgagttc

SEQ ID NO: 8146 - RNA, 21 nt, synthetic construct
  source 1..21: mol_type = other RNA
ttcacaattaagctccttctt

SEQ ID NO: 8147 - RNA, 21 nt, synthetic construct
  source 1..21: mol_type = other RNA
ttcactggtttgcagcgatag

SEQ ID NO: 8148 - RNA, 21 nt, synthetic construct
  source 1..21: mol_type = other RNA
ttcacttaaagtaagtagaaa

SEQ ID NO: 8149 - RNA, 21 nt, synthetic construct
  source 1..21: mol_type = other RNA
ttcactttttgttgaagtaga

SEQ ID NO: 8150 - RNA, 21 nt, synthetic construct
  source 1..21: mol_type = other RNA
ttcaggttgattttgaattaa

SEQ ID NO: 8151 - RNA, 21 nt, synthetic construct
  source 1..21: mol_type = other RNA
ttcagttgggacatggtctta

SEQ ID NO: 8152 - RNA, 21 nt, synthetic construct
  source 1..21: mol_type = other RNA
ttcatcatttgattctctatc

SEQ ID NO: 8153 - RNA, 21 nt, synthetic construct
  source 1..21: mol_type = other RNA
ttcatttttgacttgtagttt

SEQ ID NO: 8154 - RNA, 21 nt, synthetic construct
  source 1..21: mol_type = other RNA
ttcctccagaattgatcaaga

SEQ ID NO: 8155 - RNA, 21 nt, synthetic construct
  source 1..21: mol_type = other RNA
ttcctctagttatttcctcca

SEQ ID NO: 8156 - RNA, 21 nt, synthetic construct
  source 1..21: mol_type = other RNA
ttccttttcttcttctttgat

SEQ ID NO: 8157 - RNA, 21 nt, synthetic construct
  source 1..21: mol_type = other RNA
ttcgtcttatggacaaagtct

SEQ ID NO: 8158 - RNA, 21 nt, synthetic construct
  source 1..21: mol_type = other RNA
ttctacttactttaagtgaag

SEQ ID NO: 8159 - RNA, 21 nt, synthetic construct
  source 1..21: mol_type = other RNA
ttctacttcaacaaaaagtga

SEQ ID NO: 8160 - RNA, 21 nt, synthetic construct
  source 1..21: mol_type = other RNA
ttctaggaggctttcaagttt

SEQ ID NO: 8161 - RNA, 21 nt, synthetic construct
  source 1..21: mol_type = other RNA
ttctcagttccttttcttctt

SEQ ID NO: 8162 - RNA, 21 nt, synthetic construct
  source 1..21: mol_type = other RNA
ttctctatctccagagccaaa

SEQ ID NO: 8163 - RNA, 21 nt, synthetic construct
  source 1..21: mol_type = other RNA
ttctggaggaaataactagag

SEQ ID NO: 8164 - RNA, 21 nt, synthetic construct
  source 1..21: mol_type = other RNA
ttctggagtttcaggttgatt

SEQ ID NO: 8165 - RNA, 21 nt, synthetic construct
  source 1..21: mol_type = other RNA
ttctgggtgttctggagtttc

SEQ ID NO: 8166 - RNA, 21 nt, synthetic construct
  source 1..21: mol_type = other RNA
ttcttctaggaggctttcaag

SEQ ID NO: 8167 - RNA, 21 nt, synthetic construct
  source 1..21: mol_type = other RNA
ttcttctcagttccttttctt

SEQ ID NO: 8168 - RNA, 21 nt, synthetic construct
  source 1..21: mol_type = other RNA
ttcttcttctttgatttcact

SEQ ID NO: 8169 - RNA, 21 nt, synthetic construct
  source 1..21: mol_type = other RNA
ttcttctttgatttcactggt

SEQ ID NO: 8170 - RNA, 21 nt, synthetic construct
  source 1..21: mol_type = other RNA
ttctttacctcttcatttttg

SEQ ID NO: 8171 - RNA, 21 nt, synthetic construct
  source 1..21: mol_type = other RNA
ttctttgatttcactggtttg

SEQ ID NO: 8172 - RNA, 21 nt, synthetic construct
  source 1..21: mol_type = other RNA
ttctttttattgttcctctag

SEQ ID NO: 8173 - RNA, 21 nt, synthetic construct
  source 1..21: mol_type = other RNA
ttgaaagcctcctagaagaaa

SEQ ID NO: 8174 - RNA, 21 nt, synthetic construct
  source 1..21: mol_type = other RNA
ttgaactcaactcaaaacttg

SEQ ID NO: 8175 - RNA, 21 nt, synthetic construct
  source 1..21: mol_type = other RNA
ttgaagtagaattttttcttc

SEQ ID NO: 8176 - RNA, 21 nt, synthetic construct
  source 1..21: mol_type = other RNA
ttgaattaagttagttagttg

SEQ ID NO: 8177 - RNA, 21 nt, synthetic construct
  source 1..21: mol_type = other RNA
ttgacttgtagtttatatgta

SEQ ID NO: 8178 - RNA, 21 nt, synthetic construct
  source 1..21: mol_type = other RNA
ttgagttcaagtgacatattc

SEQ ID NO: 8179 - RNA, 21 nt, synthetic construct
  source 1..21: mol_type = other RNA
ttgagttgagttcaagtgaca

SEQ ID NO: 8180 - RNA, 21 nt, synthetic construct
  source 1..21: mol_type = other RNA
ttgagtttttgaaatatgtca

SEQ ID NO: 8181 - RNA, 21 nt, synthetic construct
  source 1..21: mol_type = other RNA
ttgatcaagacaattcatcat

SEQ ID NO: 8182 - RNA, 21 nt, synthetic construct
  source 1..21: mol_type = other RNA
ttgatcaattctggaggaaat

SEQ ID NO: 8183 - RNA, 21 nt, synthetic construct
  source 1..21: mol_type = other RNA
ttgatcagtctttttatgatc

SEQ ID NO: 8184 - RNA, 21 nt, synthetic construct
  source 1..21: mol_type = other RNA
ttgattctctatctccagagc

SEQ ID NO: 8185 - RNA, 21 nt, synthetic construct
  source 1..21: mol_type = other RNA
ttgatttcactggtttgcagc

SEQ ID NO: 8186 - RNA, 21 nt, synthetic construct
  source 1..21: mol_type = other RNA
ttgattttggctctggagata

SEQ ID NO: 8187 - RNA, 21 nt, synthetic construct
  source 1..21: mol_type = other RNA
ttgcagcgatagatcataaaa

SEQ ID NO: 8188 - RNA, 21 nt, synthetic construct
  source 1..21: mol_type = other RNA
ttgctatgttagacgatgtaa

SEQ ID NO: 8189 - RNA, 21 nt, synthetic construct
  source 1..21: mol_type = other RNA
ttgctcttctaaatatttcac

SEQ ID NO: 8190 - RNA, 21 nt, synthetic construct
  source 1..21: mol_type = other RNA
ttggcccttcgtcttatggac

SEQ ID NO: 8191 - RNA, 21 nt, synthetic construct
  source 1..21: mol_type = other RNA
ttggctaaaatttttacatcg

SEQ ID NO: 8192 - RNA, 21 nt, synthetic construct
  source 1..21: mol_type = other RNA
ttggctctggagatagagaat

SEQ ID NO: 8193 - RNA, 21 nt, synthetic construct
  source 1..21: mol_type = other RNA
ttgggacatggtcttaaagac

SEQ ID NO: 8194 - RNA, 21 nt, synthetic construct
  source 1..21: mol_type = other RNA
ttgtagtttatatgtagttct

SEQ ID NO: 8195 - RNA, 21 nt, synthetic construct
  source 1..21: mol_type = other RNA
ttgtccataagacgaagggcc

SEQ ID NO: 8196 - RNA, 21 nt, synthetic construct
  source 1..21: mol_type = other RNA
ttgtcttgatcaattctggag

SEQ ID NO: 8197 - RNA, 21 nt, synthetic construct
  source 1..21: mol_type = other RNA
ttgttcctctagttatttcct

SEQ ID NO: 8198 - RNA, 21 nt, synthetic construct
  source 1..21: mol_type = other RNA
ttgttgaagtagaattttttc

SEQ ID NO: 8199 - RNA, 21 nt, synthetic construct
  source 1..21: mol_type = other RNA
tttaagaccatgtcccaactg

SEQ ID NO: 8200 - RNA, 21 nt, synthetic construct
  source 1..21: mol_type = other RNA
tttaagtgaagttacttctgg

SEQ ID NO: 8201 - RNA, 21 nt, synthetic construct
  source 1..21: mol_type = other RNA
tttacatcgtctaacatagca

SEQ ID NO: 8202 - RNA, 21 nt, synthetic construct
  source 1..21: mol_type = other RNA
tttacctcttcatttttgact

SEQ ID NO: 8203 - RNA, 21 nt, synthetic construct
  source 1..21: mol_type = other RNA
tttagaagagcaactaactaa

SEQ ID NO: 8204 - RNA, 21 nt, synthetic construct
  source 1..21: mol_type = other RNA
tttagccaatggcctccttca

SEQ ID NO: 8205 - RNA, 21 nt, synthetic construct
  source 1..21: mol_type = other RNA
tttatatgtagttcttctcag

SEQ ID NO: 8206 - RNA, 21 nt, synthetic construct
  source 1..21: mol_type = other RNA
tttatgatctatcgctgcaaa

SEQ ID NO: 8207 - RNA, 21 nt, synthetic construct
  source 1..21: mol_type = other RNA
tttattgttcctctagttatt

SEQ ID NO: 8208 - RNA, 21 nt, synthetic construct
  source 1..21: mol_type = other RNA
tttcaagttttgagttgagtt

SEQ ID NO: 8209 - RNA, 21 nt, synthetic construct
  source 1..21: mol_type = other RNA
tttcactggtttgcagcgata

SEQ ID NO: 8210 - RNA, 21 nt, synthetic construct
  source 1..21: mol_type = other RNA
tttcactttttgttgaagtag

SEQ ID NO: 8211 - RNA, 21 nt, synthetic construct
  source 1..21: mol_type = other RNA
tttcaggttgattttgaatta

SEQ ID NO: 8212 - RNA, 21 nt, synthetic construct
  source 1..21: mol_type = other RNA
tttcctccagaattgatcaag

SEQ ID NO: 8213 - RNA, 21 nt, synthetic construct
  source 1..21: mol_type = other RNA
tttctacttactttaagtgaa

SEQ ID NO: 8214 - RNA, 21 nt, synthetic construct
  source 1..21: mol_type = other RNA
tttcttctaggaggctttcaa

SEQ ID NO: 8215 - RNA, 21 nt, synthetic construct
  source 1..21: mol_type = other RNA
tttcttcttctttgatttcac

SEQ ID NO: 8216 - RNA, 21 nt, synthetic construct
  source 1..21: mol_type = other RNA
tttgacttgtagtttatatgt

SEQ ID NO: 8217 - RNA, 21 nt, synthetic construct
  source 1..21: mol_type = other RNA
tttgagttgagttcaagtgac

SEQ ID NO: 8218 - RNA, 21 nt, synthetic construct
  source 1..21: mol_type = other RNA
tttgatcagtctttttatgat

SEQ ID NO: 8219 - RNA, 21 nt, synthetic construct
  source 1..21: mol_type = other RNA
tttgattctctatctccagag

SEQ ID NO: 8220 - RNA, 21 nt, synthetic construct
  source 1..21: mol_type = other RNA
tttgatttcactggtttgcag

SEQ ID NO: 8221 - RNA, 21 nt, synthetic construct
  source 1..21: mol_type = other RNA
tttgcagcgatagatcataaa

SEQ ID NO: 8222 - RNA, 21 nt, synthetic construct
  source 1..21: mol_type = other RNA
tttgctatgttagacgatgta

SEQ ID NO: 8223 - RNA, 21 nt, synthetic construct
  source 1..21: mol_type = other RNA
tttggcccttcgtcttatgga

SEQ ID NO: 8224 - RNA, 21 nt, synthetic construct
  source 1..21: mol_type = other RNA
tttggctctggagatagagaa

SEQ ID NO: 8225 - RNA, 21 nt, synthetic construct
  source 1..21: mol_type = other RNA
tttgtccataagacgaagggc

SEQ ID NO: 8226 - RNA, 21 nt, synthetic construct
  source 1..21: mol_type = other RNA
ttttacatcgtctaacatagc

SEQ ID NO: 8227 - RNA, 21 nt, synthetic construct
  source 1..21: mol_type = other RNA
ttttagccaatggcctccttc

SEQ ID NO: 8228 - RNA, 21 nt, synthetic construct
  source 1..21: mol_type = other RNA
ttttatgatctatcgctgcaa

SEQ ID NO: 8229 - RNA, 21 nt, synthetic construct
  source 1..21: mol_type = other RNA
ttttattgttcctctagttat

SEQ ID NO: 8230 - RNA, 21 nt, synthetic construct
  source 1..21: mol_type = other RNA
ttttctacttactttaagtga

SEQ ID NO: 8231 - RNA, 21 nt, synthetic construct
  source 1..21: mol_type = other RNA
ttttcttctaggaggctttca

SEQ ID NO: 8232 - RNA, 21 nt, synthetic construct
  source 1..21: mol_type = other RNA
ttttcttcttctttgatttca

SEQ ID NO: 8233 - RNA, 21 nt, synthetic construct
  source 1..21: mol_type = other RNA
ttttgacttgtagtttatatg

SEQ ID NO: 8234 - RNA, 21 nt, synthetic construct
  source 1..21: mol_type = other RNA
ttttgagttgagttcaagtga

SEQ ID NO: 8235 - RNA, 21 nt, synthetic construct
  source 1..21: mol_type = other RNA
ttttggctctggagatagaga

SEQ ID NO: 8236 - RNA, 21 nt, synthetic construct
  source 1..21: mol_type = other RNA
tttttacatcgtctaacatag

SEQ ID NO: 8237 - RNA, 21 nt, synthetic construct
  source 1..21: mol_type = other RNA
tttttatgatctatcgctgca

SEQ ID NO: 8238 - RNA, 21 nt, synthetic construct
  source 1..21: mol_type = other RNA
tttttattgttcctctagtta

SEQ ID NO: 8239 - RNA, 21 nt, synthetic construct
  source 1..21: mol_type = other RNA
tttttcttctaggaggctttc

SEQ ID NO: 8240 - RNA, 21 nt, synthetic construct
  source 1..21: mol_type = other RNA
ttttttcttctaggaggcttt

SEQ ID NO: 8241 - RNA, 22 nt, synthetic construct
  source 1..22: mol_type = other RNA
aaaaactcaacatatttgatca

SEQ ID NO: 8242 - RNA, 22 nt, synthetic construct
  source 1..22: mol_type = other RNA
aaaaagactgatcaaatatgtt

SEQ ID NO: 8243 - RNA, 22 nt, synthetic construct
  source 1..22: mol_type = other RNA
aaaaatgaagaggtaaagaata

SEQ ID NO: 8244 - RNA, 22 nt, synthetic construct
  source 1..22: mol_type = other RNA
aaaaattttagccaatggcctc

SEQ ID NO: 8245 - RNA, 22 nt, synthetic construct
  source 1..22: mol_type = other RNA
aaaactcaacatatttgatcag

SEQ ID NO: 8246 - RNA, 22 nt, synthetic construct
  source 1..22: mol_type = other RNA
aaaacttgaaagcctcctagaa

SEQ ID NO: 8247 - RNA, 22 nt, synthetic construct
  source 1..22: mol_type = other RNA
aaaagactgatcaaatatgttg

SEQ ID NO: 8248 - RNA, 22 nt, synthetic construct
  source 1..22: mol_type = other RNA
aaaaggaactgagaagaactac

SEQ ID NO: 8249 - RNA, 22 nt, synthetic construct
  source 1..22: mol_type = other RNA
aaaagtgaaatatttagaagag

SEQ ID NO: 8250 - RNA, 22 nt, synthetic construct
  source 1..22: mol_type = other RNA
aaaatcaacctgaaactccaga

SEQ ID NO: 8251 - RNA, 22 nt, synthetic construct
  source 1..22: mol_type = other RNA
aaaatcaagatttgctatgtta

SEQ ID NO: 8252 - RNA, 22 nt, synthetic construct
  source 1..22: mol_type = other RNA
aaaatgaagaggtaaagaatat

SEQ ID NO: 8253 - RNA, 22 nt, synthetic construct
  source 1..22: mol_type = other RNA
aaaattctacttcaacaaaaag

SEQ ID NO: 8254 - RNA, 22 nt, synthetic construct
  source 1..22: mol_type = other RNA
aaaattttagccaatggcctcc

SEQ ID NO: 8255 - RNA, 22 nt, synthetic construct
  source 1..22: mol_type = other RNA
aaaatttttacatcgtctaaca

SEQ ID NO: 8256 - RNA, 22 nt, synthetic construct
  source 1..22: mol_type = other RNA
aaacatgaaccctctttatttt

SEQ ID NO: 8257 - RNA, 22 nt, synthetic construct
  source 1..22: mol_type = other RNA
aaaccagtgaaatcaaagaaga

SEQ ID NO: 8258 - RNA, 22 nt, synthetic construct
  source 1..22: mol_type = other RNA
aaactacaagtcaaaaatgaag

SEQ ID NO: 8259 - RNA, 22 nt, synthetic construct
  source 1..22: mol_type = other RNA
aaactcaacatatttgatcagt

SEQ ID NO: 8260 - RNA, 22 nt, synthetic construct
  source 1..22: mol_type = other RNA
aaactccagaacacccagaagt

SEQ ID NO: 8261 - RNA, 22 nt, synthetic construct
  source 1..22: mol_type = other RNA
aaacttgaaagcctcctagaag

SEQ ID NO: 8262 - RNA, 22 nt, synthetic construct
  source 1..22: mol_type = other RNA
aaagaagaagaaaaggaactga

SEQ ID NO: 8263 - RNA, 22 nt, synthetic construct
  source 1..22: mol_type = other RNA
aaagaatatgtcacttgaactc

SEQ ID NO: 8264 - RNA, 22 nt, synthetic construct
  source 1..22: mol_type = other RNA
aaagactgatcaaatatgttga

SEQ ID NO: 8265 - RNA, 22 nt, synthetic construct
  source 1..22: mol_type = other RNA
aaagactttgtccataagacga

SEQ ID NO: 8266 - RNA, 22 nt, synthetic construct
  source 1..22: mol_type = other RNA
aaagcctcctagaagaaaaaat

SEQ ID NO: 8267 - RNA, 22 nt, synthetic construct
  source 1..22: mol_type = other RNA
aaaggaactgagaagaactaca

SEQ ID NO: 8268 - RNA, 22 nt, synthetic construct
  source 1..22: mol_type = other RNA
aaagtaagtagaaaataaagag

SEQ ID NO: 8269 - RNA, 22 nt, synthetic construct
  source 1..22: mol_type = other RNA
aaagtctttaagaccatgtccc

SEQ ID NO: 8270 - RNA, 22 nt, synthetic construct
  source 1..22: mol_type = other RNA
aaagtgaaatatttagaagagc

SEQ ID NO: 8271 - RNA, 22 nt, synthetic construct
  source 1..22: mol_type = other RNA
aaataactagaggaacaataaa

SEQ ID NO: 8272 - RNA, 22 nt, synthetic construct
  source 1..22: mol_type = other RNA
aaatatgtcattaatttggccc

SEQ ID NO: 8273 - RNA, 22 nt, synthetic construct
  source 1..22: mol_type = other RNA
aaatatttagaagagcaactaa

SEQ ID NO: 8274 - RNA, 22 nt, synthetic construct
  source 1..22: mol_type = other RNA
aaatcaaagaagaagaaaagga

SEQ ID NO: 8275 - RNA, 22 nt, synthetic construct
  source 1..22: mol_type = other RNA
aaatcaacctgaaactccagaa

SEQ ID NO: 8276 - RNA, 22 nt, synthetic construct
  source 1..22: mol_type = other RNA
aaatcaagatttgctatgttag

SEQ ID NO: 8277 - RNA, 22 nt, synthetic construct
  source 1..22: mol_type = other RNA
aaatcttgattttggctctgga

SEQ ID NO: 8278 - RNA, 22 nt, synthetic construct
  source 1..22: mol_type = other RNA
aaatgaagaggtaaagaatatg

SEQ ID NO: 8279 - RNA, 22 nt, synthetic construct
  source 1..22: mol_type = other RNA
aaatgatgaattgtcttgatca

SEQ ID NO: 8280 - RNA, 22 nt, synthetic construct
  source 1..22: mol_type = other RNA
aaatgttcacaattaagctcct

SEQ ID NO: 8281 - RNA, 22 nt, synthetic construct
  source 1..22: mol_type = other RNA
aaattctacttcaacaaaaagt

SEQ ID NO: 8282 - RNA, 22 nt, synthetic construct
  source 1..22: mol_type = other RNA
aaattttagccaatggcctcct

SEQ ID NO: 8283 - RNA, 22 nt, synthetic construct
  source 1..22: mol_type = other RNA
aaatttttacatcgtctaacat

SEQ ID NO: 8284 - RNA, 22 nt, synthetic construct
  source 1..22: mol_type = other RNA
aacaataaaaagaaggagctta

SEQ ID NO: 8285 - RNA, 22 nt, synthetic construct
  source 1..22: mol_type = other RNA
aacacccagaagtaacttcact

SEQ ID NO: 8286 - RNA, 22 nt, synthetic construct
  source 1..22: mol_type = other RNA
aacatagcaaatcttgattttg

SEQ ID NO: 8287 - RNA, 22 nt, synthetic construct
  source 1..22: mol_type = other RNA
aacatatttgatcagtcttttt

SEQ ID NO: 8288 - RNA, 22 nt, synthetic construct
  source 1..22: mol_type = other RNA
aacatgaaccctctttattttc

SEQ ID NO: 8289 - RNA, 22 nt, synthetic construct
  source 1..22: mol_type = other RNA
aaccagtgaaatcaaagaagaa

SEQ ID NO: 8290 - RNA, 22 nt, synthetic construct
  source 1..22: mol_type = other RNA
aaccctctttattttctactta

SEQ ID NO: 8291 - RNA, 22 nt, synthetic construct
  source 1..22: mol_type = other RNA
aacctgaaactccagaacaccc

SEQ ID NO: 8292 - RNA, 22 nt, synthetic construct
  source 1..22: mol_type = other RNA
aactacaagtcaaaaatgaaga

SEQ ID NO: 8293 - RNA, 22 nt, synthetic construct
  source 1..22: mol_type = other RNA
aactacatataaactacaagtc

SEQ ID NO: 8294 - RNA, 22 nt, synthetic construct
  source 1..22: mol_type = other RNA
aactagaggaacaataaaaaga

SEQ ID NO: 8295 - RNA, 22 nt, synthetic construct
  source 1..22: mol_type = other RNA
aactcaaaacttgaaagcctcc

SEQ ID NO: 8296 - RNA, 22 nt, synthetic construct
  source 1..22: mol_type = other RNA
aactcaacatatttgatcagtc

SEQ ID NO: 8297 - RNA, 22 nt, synthetic construct
  source 1..22: mol_type = other RNA
aactcaactcaaaacttgaaag

SEQ ID NO: 8298 - RNA, 22 nt, synthetic construct
  source 1..22: mol_type = other RNA
aactccagaacacccagaagta

SEQ ID NO: 8299 - RNA, 22 nt, synthetic construct
  source 1..22: mol_type = other RNA
aactgaaggaggccattggcta

SEQ ID NO: 8300 - RNA, 22 nt, synthetic construct
  source 1..22: mol_type = other RNA
aactgagaagaactacatataa

SEQ ID NO: 8301 - RNA, 22 nt, synthetic construct
  source 1..22: mol_type = other RNA
aacttaattcaaaatcaacctg

SEQ ID NO: 8302 - RNA, 22 nt, synthetic construct
  source 1..22: mol_type = other RNA
aacttcacttaaagtaagtaga

SEQ ID NO: 8303 - RNA, 22 nt, synthetic construct
  source 1..22: mol_type = other RNA
aacttgaaagcctcctagaaga

SEQ ID NO: 8304 - RNA, 22 nt, synthetic construct
  source 1..22: mol_type = other RNA
aagaaaaaattctacttcaaca

SEQ ID NO: 8305 - RNA, 22 nt, synthetic construct
  source 1..22: mol_type = other RNA
aagaaaaggaactgagaagaac

SEQ ID NO: 8306 - RNA, 22 nt, synthetic construct
  source 1..22: mol_type = other RNA
aagaactacatataaactacaa

SEQ ID NO: 8307 - RNA, 22 nt, synthetic construct
  source 1..22: mol_type = other RNA
aagaagaaaaggaactgagaag

SEQ ID NO: 8308 - RNA, 22 nt, synthetic construct
  source 1..22: mol_type = other RNA
aagaagaagaaaaggaactgag

SEQ ID NO: 8309 - RNA, 22 nt, synthetic construct
  source 1..22: mol_type = other RNA
aagaatatgtcacttgaactca

SEQ ID NO: 8310 - RNA, 22 nt, synthetic construct
  source 1..22: mol_type = other RNA
aagacaattcatcatttgattc

SEQ ID NO: 8311 - RNA, 22 nt, synthetic construct
  source 1..22: mol_type = other RNA
aagaccatgtcccaactgaagg

SEQ ID NO: 8312 - RNA, 22 nt, synthetic construct
  source 1..22: mol_type = other RNA
aagacgaagggccaaattaatg

SEQ ID NO: 8313 - RNA, 22 nt, synthetic construct
  source 1..22: mol_type = other RNA
aagactgatcaaatatgttgag

SEQ ID NO: 8314 - RNA, 22 nt, synthetic construct
  source 1..22: mol_type = other RNA
aagactttgtccataagacgaa

SEQ ID NO: 8315 - RNA, 22 nt, synthetic construct
  source 1..22: mol_type = other RNA
aagagcaactaactaacttaat

SEQ ID NO: 8316 - RNA, 22 nt, synthetic construct
  source 1..22: mol_type = other RNA
aagaggtaaagaatatgtcact

SEQ ID NO: 8317 - RNA, 22 nt, synthetic construct
  source 1..22: mol_type = other RNA
aagatttgctatgttagacgat

SEQ ID NO: 8318 - RNA, 22 nt, synthetic construct
  source 1..22: mol_type = other RNA
aagcctcctagaagaaaaaatt

SEQ ID NO: 8319 - RNA, 22 nt, synthetic construct
  source 1..22: mol_type = other RNA
aagctccttctttttattgttc

SEQ ID NO: 8320 - RNA, 22 nt, synthetic construct
  source 1..22: mol_type = other RNA
aaggaactgagaagaactacat

SEQ ID NO: 8321 - RNA, 22 nt, synthetic construct
  source 1..22: mol_type = other RNA
aaggaggccattggctaaaatt

SEQ ID NO: 8322 - RNA, 22 nt, synthetic construct
  source 1..22: mol_type = other RNA
aagggccaaattaatgacatat

SEQ ID NO: 8323 - RNA, 22 nt, synthetic construct
  source 1..22: mol_type = other RNA
aagtaacttcacttaaagtaag

SEQ ID NO: 8324 - RNA, 22 nt, synthetic construct
  source 1..22: mol_type = other RNA
aagtaagtagaaaataaagagg

SEQ ID NO: 8325 - RNA, 22 nt, synthetic construct
  source 1..22: mol_type = other RNA
aagtagaattttttcttctagg

SEQ ID NO: 8326 - RNA, 22 nt, synthetic construct
  source 1..22: mol_type = other RNA
aagtcaaaaatgaagaggtaaa

SEQ ID NO: 8327 - RNA, 22 nt, synthetic construct
  source 1..22: mol_type = other RNA
aagtctttaagaccatgtccca

SEQ ID NO: 8328 - RNA, 22 nt, synthetic construct
  source 1..22: mol_type = other RNA
aagtgaaatatttagaagagca

SEQ ID NO: 8329 - RNA, 22 nt, synthetic construct
  source 1..22: mol_type = other RNA
aagtgaagttacttctgggtgt

SEQ ID NO: 8330 - RNA, 22 nt, synthetic construct
  source 1..22: mol_type = other RNA
aagtgacatattctttacctct

SEQ ID NO: 8331 - RNA, 22 nt, synthetic construct
  source 1..22: mol_type = other RNA
aagttacttctgggtgttctgg

SEQ ID NO: 8332 - RNA, 22 nt, synthetic construct
  source 1..22: mol_type = other RNA
aagttagttagttgctcttcta

SEQ ID NO: 8333 - RNA, 22 nt, synthetic construct
  source 1..22: mol_type = other RNA
aagttttgagttgagttcaagt

SEQ ID NO: 8334 - RNA, 22 nt, synthetic construct
  source 1..22: mol_type = other RNA
aataaaaagaaggagcttaatt

SEQ ID NO: 8335 - RNA, 22 nt, synthetic construct
  source 1..22: mol_type = other RNA
aataactagaggaacaataaaa

SEQ ID NO: 8336 - RNA, 22 nt, synthetic construct
  source 1..22: mol_type = other RNA
aatatgtcacttgaactcaact

SEQ ID NO: 8337 - RNA, 22 nt, synthetic construct
  source 1..22: mol_type = other RNA
aatatgtcattaatttggccct

SEQ ID NO: 8338 - RNA, 22 nt, synthetic construct
  source 1..22: mol_type = other RNA
aatatttagaagagcaactaac

SEQ ID NO: 8339 - RNA, 22 nt, synthetic construct
  source 1..22: mol_type = other RNA
aatatttcactttttgttgaag

SEQ ID NO: 8340 - RNA, 22 nt, synthetic construct
  source 1..22: mol_type = other RNA
aatcaaagaagaagaaaaggaa

SEQ ID NO: 8341 - RNA, 22 nt, synthetic construct
  source 1..22: mol_type = other RNA
aatcaaatgatgaattgtcttg

SEQ ID NO: 8342 - RNA, 22 nt, synthetic construct
  source 1..22: mol_type = other RNA
aatcaacctgaaactccagaac

SEQ ID NO: 8343 - RNA, 22 nt, synthetic construct
  source 1..22: mol_type = other RNA
aatcaagatttgctatgttaga

SEQ ID NO: 8344 - RNA, 22 nt, synthetic construct
  source 1..22: mol_type = other RNA
aatcttgattttggctctggag

SEQ ID NO: 8345 - RNA, 22 nt, synthetic construct
  source 1..22: mol_type = other RNA
aatgaagaggtaaagaatatgt

SEQ ID NO: 8346 - RNA, 22 nt, synthetic construct
  source 1..22: mol_type = other RNA
aatgacatatttcaaaaactca

SEQ ID NO: 8347 - RNA, 22 nt, synthetic construct
  source 1..22: mol_type = other RNA
aatgatgaattgtcttgatcaa

SEQ ID NO: 8348 - RNA, 22 nt, synthetic construct
  source 1..22: mol_type = other RNA
aatggcctccttcagttgggac

SEQ ID NO: 8349 - RNA, 22 nt, synthetic construct
  source 1..22: mol_type = other RNA
aatgttcacaattaagctcctt

SEQ ID NO: 8350 - RNA, 22 nt, synthetic construct
  source 1..22: mol_type = other RNA
aattaagctccttctttttatt

SEQ ID NO: 8351 - RNA, 22 nt, synthetic construct
  source 1..22: mol_type = other RNA
aattaagttagttagttgctct

SEQ ID NO: 8352 - RNA, 22 nt, synthetic construct
  source 1..22: mol_type = other RNA
aattcaaaatcaacctgaaact

SEQ ID NO: 8353 - RNA, 22 nt, synthetic construct
  source 1..22: mol_type = other RNA
aattcatcatttgattctctat

SEQ ID NO: 8354 - RNA, 22 nt, synthetic construct
  source 1..22: mol_type = other RNA
aattctacttcaacaaaaagtg

SEQ ID NO: 8355 - RNA, 22 nt, synthetic construct
  source 1..22: mol_type = other RNA
aattctggaggaaataactaga

SEQ ID NO: 8356 - RNA, 22 nt, synthetic construct
  source 1..22: mol_type = other RNA
aattgatcaagacaattcatca

SEQ ID NO: 8357 - RNA, 22 nt, synthetic construct
  source 1..22: mol_type = other RNA
aattgtcttgatcaattctgga

SEQ ID NO: 8358 - RNA, 22 nt, synthetic construct
  source 1..22: mol_type = other RNA
aatttggcccttcgtcttatgg

SEQ ID NO: 8359 - RNA, 22 nt, synthetic construct
  source 1..22: mol_type = other RNA
aattttagccaatggcctcctt

SEQ ID NO: 8360 - RNA, 22 nt, synthetic construct
  source 1..22: mol_type = other RNA
aatttttacatcgtctaacata

SEQ ID NO: 8361 - RNA, 22 nt, synthetic construct
  source 1..22: mol_type = other RNA
aattttttcttctaggaggctt

SEQ ID NO: 8362 - RNA, 22 nt, synthetic construct
  source 1..22: mol_type = other RNA
acaaagtctttaagaccatgtc

SEQ ID NO: 8363 - RNA, 22 nt, synthetic construct
  source 1..22: mol_type = other RNA
acaagtcaaaaatgaagaggta

SEQ ID NO: 8364 - RNA, 22 nt, synthetic construct
  source 1..22: mol_type = other RNA
acaataaaaagaaggagcttaa

SEQ ID NO: 8365 - RNA, 22 nt, synthetic construct
  source 1..22: mol_type = other RNA
acaattaagctccttcttttta

SEQ ID NO: 8366 - RNA, 22 nt, synthetic construct
  source 1..22: mol_type = other RNA
acaattcatcatttgattctct

SEQ ID NO: 8367 - RNA, 22 nt, synthetic construct
  source 1..22: mol_type = other RNA
acacccagaagtaacttcactt

SEQ ID NO: 8368 - RNA, 22 nt, synthetic construct
  source 1..22: mol_type = other RNA
acatagcaaatcttgattttgg

SEQ ID NO: 8369 - RNA, 22 nt, synthetic construct
  source 1..22: mol_type = other RNA
acatataaactacaagtcaaaa

SEQ ID NO: 8370 - RNA, 22 nt, synthetic construct
  source 1..22: mol_type = other RNA
acatattctttacctcttcatt

SEQ ID NO: 8371 - RNA, 22 nt, synthetic construct
  source 1..22: mol_type = other RNA
acatatttcaaaaactcaacat

SEQ ID NO: 8372 - RNA, 22 nt, synthetic construct
  source 1..22: mol_type = other RNA
acatatttgatcagtcttttta

SEQ ID NO: 8373 - RNA, 22 nt, synthetic construct
  source 1..22: mol_type = other RNA
acatcgtctaacatagcaaatc

SEQ ID NO: 8374 - RNA, 22 nt, synthetic construct
  source 1..22: mol_type = other RNA
acatgaaccctctttattttct

SEQ ID NO: 8375 - RNA, 22 nt, synthetic construct
  source 1..22: mol_type = other RNA
acatggtcttaaagactttgtc

SEQ ID NO: 8376 - RNA, 22 nt, synthetic construct
  source 1..22: mol_type = other RNA
accagtgaaatcaaagaagaag

SEQ ID NO: 8377 - RNA, 22 nt, synthetic construct
  source 1..22: mol_type = other RNA
accatgtcccaactgaaggagg

SEQ ID NO: 8378 - RNA, 22 nt, synthetic construct
  source 1..22: mol_type = other RNA
acccagaagtaacttcacttaa

SEQ ID NO: 8379 - RNA, 22 nt, synthetic construct
  source 1..22: mol_type = other RNA
accctctttattttctacttac

SEQ ID NO: 8380 - RNA, 22 nt, synthetic construct
  source 1..22: mol_type = other RNA
acctcttcatttttgacttgta

SEQ ID NO: 8381 - RNA, 22 nt, synthetic construct
  source 1..22: mol_type = other RNA
acctgaaactccagaacaccca

SEQ ID NO: 8382 - RNA, 22 nt, synthetic construct
  source 1..22: mol_type = other RNA
acgaagggccaaattaatgaca

SEQ ID NO: 8383 - RNA, 22 nt, synthetic construct
  source 1..22: mol_type = other RNA
acgatgtaaaaattttagccaa

SEQ ID NO: 8384 - RNA, 22 nt, synthetic construct
  source 1..22: mol_type = other RNA
actaacttaattcaaaatcaac

SEQ ID NO: 8385 - RNA, 22 nt, synthetic construct
  source 1..22: mol_type = other RNA
actacaagtcaaaaatgaagag

SEQ ID NO: 8386 - RNA, 22 nt, synthetic construct
  source 1..22: mol_type = other RNA
actacatataaactacaagtca

SEQ ID NO: 8387 - RNA, 22 nt, synthetic construct
  source 1..22: mol_type = other RNA
actagaggaacaataaaaagaa

SEQ ID NO: 8388 - RNA, 22 nt, synthetic construct
  source 1..22: mol_type = other RNA
actcaaaacttgaaagcctcct

SEQ ID NO: 8389 - RNA, 22 nt, synthetic construct
  source 1..22: mol_type = other RNA
actcaacatatttgatcagtct

SEQ ID NO: 8390 - RNA, 22 nt, synthetic construct
  source 1..22: mol_type = other RNA
actcaactcaaaacttgaaagc

SEQ ID NO: 8391 - RNA, 22 nt, synthetic construct
  source 1..22: mol_type = other RNA
actccagaacacccagaagtaa

SEQ ID NO: 8392 - RNA, 22 nt, synthetic construct
  source 1..22: mol_type = other RNA
actgaaggaggccattggctaa

SEQ ID NO: 8393 - RNA, 22 nt, synthetic construct
  source 1..22: mol_type = other RNA
actgagaagaactacatataaa

SEQ ID NO: 8394 - RNA, 22 nt, synthetic construct
  source 1..22: mol_type = other RNA
actgatcaaatatgttgagttt

SEQ ID NO: 8395 - RNA, 22 nt, synthetic construct
  source 1..22: mol_type = other RNA
actggtttgcagcgatagatca

SEQ ID NO: 8396 - RNA, 22 nt, synthetic construct
  source 1..22: mol_type = other RNA
acttaattcaaaatcaacctga

SEQ ID NO: 8397 - RNA, 22 nt, synthetic construct
  source 1..22: mol_type = other RNA
acttactttaagtgaagttact

SEQ ID NO: 8398 - RNA, 22 nt, synthetic construct
  source 1..22: mol_type = other RNA
acttcaacaaaaagtgaaatat

SEQ ID NO: 8399 - RNA, 22 nt, synthetic construct
  source 1..22: mol_type = other RNA
acttcacttaaagtaagtagaa

SEQ ID NO: 8400 - RNA, 22 nt, synthetic construct
  source 1..22: mol_type = other RNA
acttctgggtgttctggagttt

SEQ ID NO: 8401 - RNA, 22 nt, synthetic construct
  source 1..22: mol_type = other RNA
acttgaaagcctcctagaagaa

SEQ ID NO: 8402 - RNA, 22 nt, synthetic construct
  source 1..22: mol_type = other RNA
acttgaactcaactcaaaactt

SEQ ID NO: 8403 - RNA, 22 nt, synthetic construct
  source 1..22: mol_type = other RNA
acttgtagtttatatgtagttc

SEQ ID NO: 8404 - RNA, 22 nt, synthetic construct
  source 1..22: mol_type = other RNA
actttaagtgaagttacttctg

SEQ ID NO: 8405 - RNA, 22 nt, synthetic construct
  source 1..22: mol_type = other RNA
actttgtccataagacgaaggg

SEQ ID NO: 8406 - RNA, 22 nt, synthetic construct
  source 1..22: mol_type = other RNA
actttttgttgaagtagaattt

SEQ ID NO: 8407 - RNA, 22 nt, synthetic construct
  source 1..22: mol_type = other RNA
agaaaaaattctacttcaacaa

SEQ ID NO: 8408 - RNA, 22 nt, synthetic construct
  source 1..22: mol_type = other RNA
agaaaaggaactgagaagaact

SEQ ID NO: 8409 - RNA, 22 nt, synthetic construct
  source 1..22: mol_type = other RNA
agaacacccagaagtaacttca

SEQ ID NO: 8410 - RNA, 22 nt, synthetic construct
  source 1..22: mol_type = other RNA
agaactacatataaactacaag

SEQ ID NO: 8411 - RNA, 22 nt, synthetic construct
  source 1..22: mol_type = other RNA
agaagaaaaaattctacttcaa

SEQ ID NO: 8412 - RNA, 22 nt, synthetic construct
  source 1..22: mol_type = other RNA
agaagaaaaggaactgagaaga

SEQ ID NO: 8413 - RNA, 22 nt, synthetic construct
  source 1..22: mol_type = other RNA
agaagaactacatataaactac

SEQ ID NO: 8414 - RNA, 22 nt, synthetic construct
  source 1..22: mol_type = other RNA
agaagaagaaaaggaactgaga

SEQ ID NO: 8415 - RNA, 22 nt, synthetic construct
  source 1..22: mol_type = other RNA
agaagagcaactaactaactta

SEQ ID NO: 8416 - RNA, 22 nt, synthetic construct
  source 1..22: mol_type = other RNA
agaagtaacttcacttaaagta

SEQ ID NO: 8417 - RNA, 22 nt, synthetic construct
  source 1..22: mol_type = other RNA
agaatatgtcacttgaactcaa

SEQ ID NO: 8418 - RNA, 22 nt, synthetic construct
  source 1..22: mol_type = other RNA
agaatcaaatgatgaattgtct

SEQ ID NO: 8419 - RNA, 22 nt, synthetic construct
  source 1..22: mol_type = other RNA
agaattgatcaagacaattcat

SEQ ID NO: 8420 - RNA, 22 nt, synthetic construct
  source 1..22: mol_type = other RNA
agaattttttcttctaggaggc

SEQ ID NO: 8421 - RNA, 22 nt, synthetic construct
  source 1..22: mol_type = other RNA
agacaattcatcatttgattct

SEQ ID NO: 8422 - RNA, 22 nt, synthetic construct
  source 1..22: mol_type = other RNA
agaccatgtcccaactgaagga

SEQ ID NO: 8423 - RNA, 22 nt, synthetic construct
  source 1..22: mol_type = other RNA
agacgaagggccaaattaatga

SEQ ID NO: 8424 - RNA, 22 nt, synthetic construct
  source 1..22: mol_type = other RNA
agacgatgtaaaaattttagcc

SEQ ID NO: 8425 - RNA, 22 nt, synthetic construct
  source 1..22: mol_type = other RNA
agactgatcaaatatgttgagt

SEQ ID NO: 8426 - RNA, 22 nt, synthetic construct
  source 1..22: mol_type = other RNA
agactttgtccataagacgaag

SEQ ID NO: 8427 - RNA, 22 nt, synthetic construct
  source 1..22: mol_type = other RNA
agagaatcaaatgatgaattgt

SEQ ID NO: 8428 - RNA, 22 nt, synthetic construct
  source 1..22: mol_type = other RNA
agagcaactaactaacttaatt

SEQ ID NO: 8429 - RNA, 22 nt, synthetic construct
  source 1..22: mol_type = other RNA
agagccaaaatcaagatttgct

SEQ ID NO: 8430 - RNA, 22 nt, synthetic construct
  source 1..22: mol_type = other RNA
agaggaacaataaaaagaagga

SEQ ID NO: 8431 - RNA, 22 nt, synthetic construct
  source 1..22: mol_type = other RNA
agaggtaaagaatatgtcactt

SEQ ID NO: 8432 - RNA, 22 nt, synthetic construct
  source 1..22: mol_type = other RNA
agatagagaatcaaatgatgaa

SEQ ID NO: 8433 - RNA, 22 nt, synthetic construct
  source 1..22: mol_type = other RNA
agatcataaaaagactgatcaa

SEQ ID NO: 8434 - RNA, 22 nt, synthetic construct
  source 1..22: mol_type = other RNA
agatttgctatgttagacgatg

SEQ ID NO: 8435 - RNA, 22 nt, synthetic construct
  source 1..22: mol_type = other RNA
agcaaatcttgattttggctct

SEQ ID NO: 8436 - RNA, 22 nt, synthetic construct
  source 1..22: mol_type = other RNA
agcaactaactaacttaattca

SEQ ID NO: 8437 - RNA, 22 nt, synthetic construct
  source 1..22: mol_type = other RNA
agccaaaatcaagatttgctat

SEQ ID NO: 8438 - RNA, 22 nt, synthetic construct
  source 1..22: mol_type = other RNA
agccaatggcctccttcagttg

SEQ ID NO: 8439 - RNA, 22 nt, synthetic construct
  source 1..22: mol_type = other RNA
agcctcctagaagaaaaaattc

SEQ ID NO: 8440 - RNA, 22 nt, synthetic construct
  source 1..22: mol_type = other RNA
agcgatagatcataaaaagact

SEQ ID NO: 8441 - RNA, 22 nt, synthetic construct
  source 1..22: mol_type = other RNA
agctccttctttttattgttcc

SEQ ID NO: 8442 - RNA, 22 nt, synthetic construct
  source 1..22: mol_type = other RNA
aggaaataactagaggaacaat

SEQ ID NO: 8443 - RNA, 22 nt, synthetic construct
  source 1..22: mol_type = other RNA
aggaacaataaaaagaaggagc

SEQ ID NO: 8444 - RNA, 22 nt, synthetic construct
  source 1..22: mol_type = other RNA
aggaactgagaagaactacata

SEQ ID NO: 8445 - RNA, 22 nt, synthetic construct
  source 1..22: mol_type = other RNA
aggaggccattggctaaaattt

SEQ ID NO: 8446 - RNA, 22 nt, synthetic construct
  source 1..22: mol_type = other RNA
aggaggctttcaagttttgagt

SEQ ID NO: 8447 - RNA, 22 nt, synthetic construct
  source 1..22: mol_type = other RNA
aggccattggctaaaattttta

SEQ ID NO: 8448 - RNA, 22 nt, synthetic construct
  source 1..22: mol_type = other RNA
aggctttcaagttttgagttga

SEQ ID NO: 8449 - RNA, 22 nt, synthetic construct
  source 1..22: mol_type = other RNA
agggccaaattaatgacatatt

SEQ ID NO: 8450 - RNA, 22 nt, synthetic construct
  source 1..22: mol_type = other RNA
aggtaaagaatatgtcacttga

SEQ ID NO: 8451 - RNA, 22 nt, synthetic construct
  source 1..22: mol_type = other RNA
aggttgattttgaattaagtta

SEQ ID NO: 8452 - RNA, 22 nt, synthetic construct
  source 1..22: mol_type = other RNA
agtaacttcacttaaagtaagt

SEQ ID NO: 8453 - RNA, 22 nt, synthetic construct
  source 1..22: mol_type = other RNA
agtaagtagaaaataaagaggg

SEQ ID NO: 8454 - RNA, 22 nt, synthetic construct
  source 1..22: mol_type = other RNA
agtagaattttttcttctagga

SEQ ID NO: 8455 - RNA, 22 nt, synthetic construct
  source 1..22: mol_type = other RNA
agtcaaaaatgaagaggtaaag

SEQ ID NO: 8456 - RNA, 22 nt, synthetic construct
  source 1..22: mol_type = other RNA
agtctttaagaccatgtcccaa

SEQ ID NO: 8457 - RNA, 22 nt, synthetic construct
  source 1..22: mol_type = other RNA
agtctttttatgatctatcgct

SEQ ID NO: 8458 - RNA, 22 nt, synthetic construct
  source 1..22: mol_type = other RNA
agtgaaatatttagaagagcaa

SEQ ID NO: 8459 - RNA, 22 nt, synthetic construct
  source 1..22: mol_type = other RNA
agtgaaatcaaagaagaagaaa

SEQ ID NO: 8460 - RNA, 22 nt, synthetic construct
  source 1..22: mol_type = other RNA
agtgaagttacttctgggtgtt

SEQ ID NO: 8461 - RNA, 22 nt, synthetic construct
  source 1..22: mol_type = other RNA
agtgacatattctttacctctt

SEQ ID NO: 8462 - RNA, 22 nt, synthetic construct
  source 1..22: mol_type = other RNA
agttacttctgggtgttctgga

SEQ ID NO: 8463 - RNA, 22 nt, synthetic construct
  source 1..22: mol_type = other RNA
agttagttagttgctcttctaa

SEQ ID NO: 8464 - RNA, 22 nt, synthetic construct
  source 1..22: mol_type = other RNA
agttagttgctcttctaaatat

SEQ ID NO: 8465 - RNA, 22 nt, synthetic construct
  source 1..22: mol_type = other RNA
agttatttcctccagaattgat

SEQ ID NO: 8466 - RNA, 22 nt, synthetic construct
  source 1..22: mol_type = other RNA
agttcaagtgacatattcttta

SEQ ID NO: 8467 - RNA, 22 nt, synthetic construct
  source 1..22: mol_type = other RNA
agttccttttcttcttctttga

SEQ ID NO: 8468 - RNA, 22 nt, synthetic construct
  source 1..22: mol_type = other RNA
agttcttctcagttccttttct

SEQ ID NO: 8469 - RNA, 22 nt, synthetic construct
  source 1..22: mol_type = other RNA
agttgagttcaagtgacatatt

SEQ ID NO: 8470 - RNA, 22 nt, synthetic construct
  source 1..22: mol_type = other RNA
agttgctcttctaaatatttca

SEQ ID NO: 8471 - RNA, 22 nt, synthetic construct
  source 1..22: mol_type = other RNA
agttgggacatggtcttaaaga

SEQ ID NO: 8472 - RNA, 22 nt, synthetic construct
  source 1..22: mol_type = other RNA
agtttatatgtagttcttctca

SEQ ID NO: 8473 - RNA, 22 nt, synthetic construct
  source 1..22: mol_type = other RNA
agtttcaggttgattttgaatt

SEQ ID NO: 8474 - RNA, 22 nt, synthetic construct
  source 1..22: mol_type = other RNA
agttttgagttgagttcaagtg

SEQ ID NO: 8475 - RNA, 22 nt, synthetic construct
  source 1..22: mol_type = other RNA
ataaaaagaaggagcttaattg

SEQ ID NO: 8476 - RNA, 22 nt, synthetic construct
  source 1..22: mol_type = other RNA
ataaaaagactgatcaaatatg

SEQ ID NO: 8477 - RNA, 22 nt, synthetic construct
  source 1..22: mol_type = other RNA
ataaactacaagtcaaaaatga

SEQ ID NO: 8478 - RNA, 22 nt, synthetic construct
  source 1..22: mol_type = other RNA
ataactagaggaacaataaaaa

SEQ ID NO: 8479 - RNA, 22 nt, synthetic construct
  source 1..22: mol_type = other RNA
ataagacgaagggccaaattaa

SEQ ID NO: 8480 - RNA, 22 nt, synthetic construct
  source 1..22: mol_type = other RNA
atagagaatcaaatgatgaatt

SEQ ID NO: 8481 - RNA, 22 nt, synthetic construct
  source 1..22: mol_type = other RNA
atagatcataaaaagactgatc

SEQ ID NO: 8482 - RNA, 22 nt, synthetic construct
  source 1..22: mol_type = other RNA
atagcaaatcttgattttggct

SEQ ID NO: 8483 - RNA, 22 nt, synthetic construct
  source 1..22: mol_type = other RNA
atatgtagttcttctcagttcc

SEQ ID NO: 8484 - RNA, 22 nt, synthetic construct
  source 1..22: mol_type = other RNA
atatgtcacttgaactcaactc

SEQ ID NO: 8485 - RNA, 22 nt, synthetic construct
  source 1..22: mol_type = other RNA
atatgtcattaatttggccctt

SEQ ID NO: 8486 - RNA, 22 nt, synthetic construct
  source 1..22: mol_type = other RNA
atattctttacctcttcatttt

SEQ ID NO: 8487 - RNA, 22 nt, synthetic construct
  source 1..22: mol_type = other RNA
atatttagaagagcaactaact

SEQ ID NO: 8488 - RNA, 22 nt, synthetic construct
  source 1..22: mol_type = other RNA
atatttcactttttgttgaagt

SEQ ID NO: 8489 - RNA, 22 nt, synthetic construct
  source 1..22: mol_type = other RNA
atatttgatcagtctttttatg

SEQ ID NO: 8490 - RNA, 22 nt, synthetic construct
  source 1..22: mol_type = other RNA
atcaaagaagaagaaaaggaac

SEQ ID NO: 8491 - RNA, 22 nt, synthetic construct
  source 1..22: mol_type = other RNA
atcaaatatgttgagtttttga

SEQ ID NO: 8492 - RNA, 22 nt, synthetic construct
  source 1..22: mol_type = other RNA
atcaaatgatgaattgtcttga

SEQ ID NO: 8493 - RNA, 22 nt, synthetic construct
  source 1..22: mol_type = other RNA
atcaacctgaaactccagaaca

SEQ ID NO: 8494 - RNA, 22 nt, synthetic construct
  source 1..22: mol_type = other RNA
atcaagacaattcatcatttga

SEQ ID NO: 8495 - RNA, 22 nt, synthetic construct
  source 1..22: mol_type = other RNA
atcaagatttgctatgttagac

SEQ ID NO: 8496 - RNA, 22 nt, synthetic construct
  source 1..22: mol_type = other RNA
atcaattctggaggaaataact

SEQ ID NO: 8497 - RNA, 22 nt, synthetic construct
  source 1..22: mol_type = other RNA
atcagtctttttatgatctatc

SEQ ID NO: 8498 - RNA, 22 nt, synthetic construct
  source 1..22: mol_type = other RNA
atcataaaaagactgatcaaat

SEQ ID NO: 8499 - RNA, 22 nt, synthetic construct
  source 1..22: mol_type = other RNA
atcatttgattctctatctcca

SEQ ID NO: 8500 - RNA, 22 nt, synthetic construct
  source 1..22: mol_type = other RNA
atcgctgcaaaccagtgaaatc

SEQ ID NO: 8501 - RNA, 22 nt, synthetic construct
  source 1..22: mol_type = other RNA
atcgtctaacatagcaaatctt

SEQ ID NO: 8502 - RNA, 22 nt, synthetic construct
  source 1..22: mol_type = other RNA
atctatcgctgcaaaccagtga

SEQ ID NO: 8503 - RNA, 22 nt, synthetic construct
  source 1..22: mol_type = other RNA
atctccagagccaaaatcaaga

SEQ ID NO: 8504 - RNA, 22 nt, synthetic construct
  source 1..22: mol_type = other RNA
atcttgattttggctctggaga

SEQ ID NO: 8505 - RNA, 22 nt, synthetic construct
  source 1..22: mol_type = other RNA
atgaaccctctttattttctac

SEQ ID NO: 8506 - RNA, 22 nt, synthetic construct
  source 1..22: mol_type = other RNA
atgaagaggtaaagaatatgtc

SEQ ID NO: 8507 - RNA, 22 nt, synthetic construct
  source 1..22: mol_type = other RNA
atgaattgtcttgatcaattct

SEQ ID NO: 8508 - RNA, 22 nt, synthetic construct
  source 1..22: mol_type = other RNA
atgacatatttcaaaaactcaa

SEQ ID NO: 8509 - RNA, 22 nt, synthetic construct
  source 1..22: mol_type = other RNA
atgatctatcgctgcaaaccag

SEQ ID NO: 8510 - RNA, 22 nt, synthetic construct
  source 1..22: mol_type = other RNA
atgatgaattgtcttgatcaat

SEQ ID NO: 8511 - RNA, 22 nt, synthetic construct
  source 1..22: mol_type = other RNA
atggacaaagtctttaagacca

SEQ ID NO: 8512 - RNA, 22 nt, synthetic construct
  source 1..22: mol_type = other RNA
atggcctccttcagttgggaca

SEQ ID NO: 8513 - RNA, 22 nt, synthetic construct
  source 1..22: mol_type = other RNA
atggtcttaaagactttgtcca

SEQ ID NO: 8514 - RNA, 22 nt, synthetic construct
  source 1..22: mol_type = other RNA
atgtaaaaattttagccaatgg

SEQ ID NO: 8515 - RNA, 22 nt, synthetic construct
  source 1..22: mol_type = other RNA
atgtagttcttctcagttcctt

SEQ ID NO: 8516 - RNA, 22 nt, synthetic construct
  source 1..22: mol_type = other RNA
atgtcacttgaactcaactcaa

SEQ ID NO: 8517 - RNA, 22 nt, synthetic construct
  source 1..22: mol_type = other RNA
atgtcattaatttggcccttcg

SEQ ID NO: 8518 - RNA, 22 nt, synthetic construct
  source 1..22: mol_type = other RNA
atgtcccaactgaaggaggcca

SEQ ID NO: 8519 - RNA, 22 nt, synthetic construct
  source 1..22: mol_type = other RNA
atgttagacgatgtaaaaattt

SEQ ID NO: 8520 - RNA, 22 nt, synthetic construct
  source 1..22: mol_type = other RNA
atgttcacaattaagctccttc

SEQ ID NO: 8521 - RNA, 22 nt, synthetic construct
  source 1..22: mol_type = other RNA
atgttgagtttttgaaatatgt

SEQ ID NO: 8522 - RNA, 22 nt, synthetic construct
  source 1..22: mol_type = other RNA
attaagctccttctttttattg

SEQ ID NO: 8523 - RNA, 22 nt, synthetic construct
  source 1..22: mol_type = other RNA
attaagttagttagttgctctt

SEQ ID NO: 8524 - RNA, 22 nt, synthetic construct
  source 1..22: mol_type = other RNA
attaatttggcccttcgtctta

SEQ ID NO: 8525 - RNA, 22 nt, synthetic construct
  source 1..22: mol_type = other RNA
attcaaaatcaacctgaaactc

SEQ ID NO: 8526 - RNA, 22 nt, synthetic construct
  source 1..22: mol_type = other RNA
attcatcatttgattctctatc

SEQ ID NO: 8527 - RNA, 22 nt, synthetic construct
  source 1..22: mol_type = other RNA
attctacttcaacaaaaagtga

SEQ ID NO: 8528 - RNA, 22 nt, synthetic construct
  source 1..22: mol_type = other RNA
attctctatctccagagccaaa

SEQ ID NO: 8529 - RNA, 22 nt, synthetic construct
  source 1..22: mol_type = other RNA
attctggaggaaataactagag

SEQ ID NO: 8530 - RNA, 22 nt, synthetic construct
  source 1..22: mol_type = other RNA
attctttacctcttcatttttg

SEQ ID NO: 8531 - RNA, 22 nt, synthetic construct
  source 1..22: mol_type = other RNA
attgatcaagacaattcatcat

SEQ ID NO: 8532 - RNA, 22 nt, synthetic construct
  source 1..22: mol_type = other RNA
attggctaaaatttttacatcg

SEQ ID NO: 8533 - RNA, 22 nt, synthetic construct
  source 1..22: mol_type = other RNA
attgtcttgatcaattctggag

SEQ ID NO: 8534 - RNA, 22 nt, synthetic construct
  source 1..22: mol_type = other RNA
attgttcctctagttatttcct

SEQ ID NO: 8535 - RNA, 22 nt, synthetic construct
  source 1..22: mol_type = other RNA
atttagaagagcaactaactaa

SEQ ID NO: 8536 - RNA, 22 nt, synthetic construct
  source 1..22: mol_type = other RNA
atttcactggtttgcagcgata

SEQ ID NO: 8537 - RNA, 22 nt, synthetic construct
  source 1..22: mol_type = other RNA
atttcactttttgttgaagtag

SEQ ID NO: 8538 - RNA, 22 nt, synthetic construct
  source 1..22: mol_type = other RNA
atttcctccagaattgatcaag

SEQ ID NO: 8539 - RNA, 22 nt, synthetic construct
  source 1..22: mol_type = other RNA
atttgatcagtctttttatgat

SEQ ID NO: 8540 - RNA, 22 nt, synthetic construct
  source 1..22: mol_type = other RNA
atttgattctctatctccagag

SEQ ID NO: 8541 - RNA, 22 nt, synthetic construct
  source 1..22: mol_type = other RNA
atttgctatgttagacgatgta

SEQ ID NO: 8542 - RNA, 22 nt, synthetic construct
  source 1..22: mol_type = other RNA
atttggcccttcgtcttatgga

SEQ ID NO: 8543 - RNA, 22 nt, synthetic construct
  source 1..22: mol_type = other RNA
attttagccaatggcctccttc

SEQ ID NO: 8544 - RNA, 22 nt, synthetic construct
  source 1..22: mol_type = other RNA
attttctacttactttaagtga

SEQ ID NO: 8545 - RNA, 22 nt, synthetic construct
  source 1..22: mol_type = other RNA
attttggctctggagatagaga

SEQ ID NO: 8546 - RNA, 22 nt, synthetic construct
  source 1..22: mol_type = other RNA
atttttacatcgtctaacatag

SEQ ID NO: 8547 - RNA, 22 nt, synthetic construct
  source 1..22: mol_type = other RNA
attttttcttctaggaggcttt

SEQ ID NO: 8548 - RNA, 22 nt, synthetic construct
  source 1..22: mol_type = other RNA
caaaaactcaacatatttgatc

SEQ ID NO: 8549 - RNA, 22 nt, synthetic construct
  source 1..22: mol_type = other RNA
caaaaagtgaaatatttagaag

SEQ ID NO: 8550 - RNA, 22 nt, synthetic construct
  source 1..22: mol_type = other RNA
caaaaatgaagaggtaaagaat

SEQ ID NO: 8551 - RNA, 22 nt, synthetic construct
  source 1..22: mol_type = other RNA
caaaacttgaaagcctcctaga

SEQ ID NO: 8552 - RNA, 22 nt, synthetic construct
  source 1..22: mol_type = other RNA
caaaatcaacctgaaactccag

SEQ ID NO: 8553 - RNA, 22 nt, synthetic construct
  source 1..22: mol_type = other RNA
caaaatcaagatttgctatgtt

SEQ ID NO: 8554 - RNA, 22 nt, synthetic construct
  source 1..22: mol_type = other RNA
caaaccagtgaaatcaaagaag

SEQ ID NO: 8555 - RNA, 22 nt, synthetic construct
  source 1..22: mol_type = other RNA
caaagaagaagaaaaggaactg

SEQ ID NO: 8556 - RNA, 22 nt, synthetic construct
  source 1..22: mol_type = other RNA
caaagtctttaagaccatgtcc

SEQ ID NO: 8557 - RNA, 22 nt, synthetic construct
  source 1..22: mol_type = other RNA
caaatatgttgagtttttgaaa

SEQ ID NO: 8558 - RNA, 22 nt, synthetic construct
  source 1..22: mol_type = other RNA
caaatcttgattttggctctgg

SEQ ID NO: 8559 - RNA, 22 nt, synthetic construct
  source 1..22: mol_type = other RNA
caaatgatgaattgtcttgatc

SEQ ID NO: 8560 - RNA, 22 nt, synthetic construct
  source 1..22: mol_type = other RNA
caacaaaaagtgaaatatttag

SEQ ID NO: 8561 - RNA, 22 nt, synthetic construct
  source 1..22: mol_type = other RNA
caacatatttgatcagtctttt

SEQ ID NO: 8562 - RNA, 22 nt, synthetic construct
  source 1..22: mol_type = other RNA
caacctgaaactccagaacacc

SEQ ID NO: 8563 - RNA, 22 nt, synthetic construct
  source 1..22: mol_type = other RNA
caactaactaacttaattcaaa

SEQ ID NO: 8564 - RNA, 22 nt, synthetic construct
  source 1..22: mol_type = other RNA
caactcaaaacttgaaagcctc

SEQ ID NO: 8565 - RNA, 22 nt, synthetic construct
  source 1..22: mol_type = other RNA
caactgaaggaggccattggct

SEQ ID NO: 8566 - RNA, 22 nt, synthetic construct
  source 1..22: mol_type = other RNA
caagacaattcatcatttgatt

SEQ ID NO: 8567 - RNA, 22 nt, synthetic construct
  source 1..22: mol_type = other RNA
caagatttgctatgttagacga

SEQ ID NO: 8568 - RNA, 22 nt, synthetic construct
  source 1..22: mol_type = other RNA
caagtcaaaaatgaagaggtaa

SEQ ID NO: 8569 - RNA, 22 nt, synthetic construct
  source 1..22: mol_type = other RNA
caagtgacatattctttacctc

SEQ ID NO: 8570 - RNA, 22 nt, synthetic construct
  source 1..22: mol_type = other RNA
caagttttgagttgagttcaag

SEQ ID NO: 8571 - RNA, 22 nt, synthetic construct
  source 1..22: mol_type = other RNA
caataaaaagaaggagcttaat

SEQ ID NO: 8572 - RNA, 22 nt, synthetic construct
  source 1..22: mol_type = other RNA
caatggcctccttcagttggga

SEQ ID NO: 8573 - RNA, 22 nt, synthetic construct
  source 1..22: mol_type = other RNA
caattaagctccttctttttat

SEQ ID NO: 8574 - RNA, 22 nt, synthetic construct
  source 1..22: mol_type = other RNA
caattcatcatttgattctcta

SEQ ID NO: 8575 - RNA, 22 nt, synthetic construct
  source 1..22: mol_type = other RNA
caattctggaggaaataactag

SEQ ID NO: 8576 - RNA, 22 nt, synthetic construct
  source 1..22: mol_type = other RNA
cacaattaagctccttcttttt

SEQ ID NO: 8577 - RNA, 22 nt, synthetic construct
  source 1..22: mol_type = other RNA
cacccagaagtaacttcactta

SEQ ID NO: 8578 - RNA, 22 nt, synthetic construct
  source 1..22: mol_type = other RNA
cactggtttgcagcgatagatc

SEQ ID NO: 8579 - RNA, 22 nt, synthetic construct
  source 1..22: mol_type = other RNA
cacttaaagtaagtagaaaata

SEQ ID NO: 8580 - RNA, 22 nt, synthetic construct
  source 1..22: mol_type = other RNA
cacttgaactcaactcaaaact

SEQ ID NO: 8581 - RNA, 22 nt, synthetic construct
  source 1..22: mol_type = other RNA
cactttttgttgaagtagaatt

SEQ ID NO: 8582 - RNA, 22 nt, synthetic construct
  source 1..22: mol_type = other RNA
cagaacacccagaagtaacttc

SEQ ID NO: 8583 - RNA, 22 nt, synthetic construct
  source 1..22: mol_type = other RNA
cagaagtaacttcacttaaagt

SEQ ID NO: 8584 - RNA, 22 nt, synthetic construct
  source 1..22: mol_type = other RNA
cagaattgatcaagacaattca

SEQ ID NO: 8585 - RNA, 22 nt, synthetic construct
  source 1..22: mol_type = other RNA
cagagccaaaatcaagatttgc

SEQ ID NO: 8586 - RNA, 22 nt, synthetic construct
  source 1..22: mol_type = other RNA
cagcgatagatcataaaaagac

SEQ ID NO: 8587 - RNA, 22 nt, synthetic construct
  source 1..22: mol_type = other RNA
caggttgattttgaattaagtt

SEQ ID NO: 8588 - RNA, 22 nt, synthetic construct
  source 1..22: mol_type = other RNA
cagtctttttatgatctatcgc

SEQ ID NO: 8589 - RNA, 22 nt, synthetic construct
  source 1..22: mol_type = other RNA
cagtgaaatcaaagaagaagaa

SEQ ID NO: 8590 - RNA, 22 nt, synthetic construct
  source 1..22: mol_type = other RNA
cagttccttttcttcttctttg

SEQ ID NO: 8591 - RNA, 22 nt, synthetic construct
  source 1..22: mol_type = other RNA
cagttgggacatggtcttaaag

SEQ ID NO: 8592 - RNA, 22 nt, synthetic construct
  source 1..22: mol_type = other RNA
cataaaaagactgatcaaatat

SEQ ID NO: 8593 - RNA, 22 nt, synthetic construct
  source 1..22: mol_type = other RNA
cataagacgaagggccaaatta

SEQ ID NO: 8594 - RNA, 22 nt, synthetic construct
  source 1..22: mol_type = other RNA
catagcaaatcttgattttggc

SEQ ID NO: 8595 - RNA, 22 nt, synthetic construct
  source 1..22: mol_type = other RNA
catataaactacaagtcaaaaa

SEQ ID NO: 8596 - RNA, 22 nt, synthetic construct
  source 1..22: mol_type = other RNA
catattctttacctcttcattt

SEQ ID NO: 8597 - RNA, 22 nt, synthetic construct
  source 1..22: mol_type = other RNA
catatttcaaaaactcaacata

SEQ ID NO: 8598 - RNA, 22 nt, synthetic construct
  source 1..22: mol_type = other RNA
catatttgatcagtctttttat

SEQ ID NO: 8599 - RNA, 22 nt, synthetic construct
  source 1..22: mol_type = other RNA
catcatttgattctctatctcc

SEQ ID NO: 8600 - RNA, 22 nt, synthetic construct
  source 1..22: mol_type = other RNA
catcgtctaacatagcaaatct

SEQ ID NO: 8601 - RNA, 22 nt, synthetic construct
  source 1..22: mol_type = other RNA
catgaaccctctttattttcta

SEQ ID NO: 8602 - RNA, 22 nt, synthetic construct
  source 1..22: mol_type = other RNA
catggtcttaaagactttgtcc

SEQ ID NO: 8603 - RNA, 22 nt, synthetic construct
  source 1..22: mol_type = other RNA
catgtcccaactgaaggaggcc

SEQ ID NO: 8604 - RNA, 22 nt, synthetic construct
  source 1..22: mol_type = other RNA
cattaatttggcccttcgtctt

SEQ ID NO: 8605 - RNA, 22 nt, synthetic construct
  source 1..22: mol_type = other RNA
cattggctaaaatttttacatc

SEQ ID NO: 8606 - RNA, 22 nt, synthetic construct
  source 1..22: mol_type = other RNA
catttgattctctatctccaga

SEQ ID NO: 8607 - RNA, 22 nt, synthetic construct
  source 1..22: mol_type = other RNA
catttttgacttgtagtttata

SEQ ID NO: 8608 - RNA, 22 nt, synthetic construct
  source 1..22: mol_type = other RNA
ccaaaatcaagatttgctatgt

SEQ ID NO: 8609 - RNA, 22 nt, synthetic construct
  source 1..22: mol_type = other RNA
ccaaattaatgacatatttcaa

SEQ ID NO: 8610 - RNA, 22 nt, synthetic construct
  source 1..22: mol_type = other RNA
ccaactgaaggaggccattggc

SEQ ID NO: 8611 - RNA, 22 nt, synthetic construct
  source 1..22: mol_type = other RNA
ccaatggcctccttcagttggg

SEQ ID NO: 8612 - RNA, 22 nt, synthetic construct
  source 1..22: mol_type = other RNA
ccagaacacccagaagtaactt

SEQ ID NO: 8613 - RNA, 22 nt, synthetic construct
  source 1..22: mol_type = other RNA
ccagaagtaacttcacttaaag

SEQ ID NO: 8614 - RNA, 22 nt, synthetic construct
  source 1..22: mol_type = other RNA
ccagaattgatcaagacaattc

SEQ ID NO: 8615 - RNA, 22 nt, synthetic construct
  source 1..22: mol_type = other RNA
ccagagccaaaatcaagatttg

SEQ ID NO: 8616 - RNA, 22 nt, synthetic construct
  source 1..22: mol_type = other RNA
ccagtgaaatcaaagaagaaga

SEQ ID NO: 8617 - RNA, 22 nt, synthetic construct
  source 1..22: mol_type = other RNA
ccataagacgaagggccaaatt

SEQ ID NO: 8618 - RNA, 22 nt, synthetic construct
  source 1..22: mol_type = other RNA
ccatgtcccaactgaaggaggc

SEQ ID NO: 8619 - RNA, 22 nt, synthetic construct
  source 1..22: mol_type = other RNA
ccattggctaaaatttttacat

SEQ ID NO: 8620 - RNA, 22 nt, synthetic construct
  source 1..22: mol_type = other RNA
cccaactgaaggaggccattgg

SEQ ID NO: 8621 - RNA, 22 nt, synthetic construct
  source 1..22: mol_type = other RNA
cccagaagtaacttcacttaaa

SEQ ID NO: 8622 - RNA, 22 nt, synthetic construct
  source 1..22: mol_type = other RNA
ccctctttattttctacttact

SEQ ID NO: 8623 - RNA, 22 nt, synthetic construct
  source 1..22: mol_type = other RNA
cccttcgtcttatggacaaagt

SEQ ID NO: 8624 - RNA, 22 nt, synthetic construct
  source 1..22: mol_type = other RNA
cctagaagaaaaaattctactt

SEQ ID NO: 8625 - RNA, 22 nt, synthetic construct
  source 1..22: mol_type = other RNA
cctccagaattgatcaagacaa

SEQ ID NO: 8626 - RNA, 22 nt, synthetic construct
  source 1..22: mol_type = other RNA
cctcctagaagaaaaaattcta

SEQ ID NO: 8627 - RNA, 22 nt, synthetic construct
  source 1..22: mol_type = other RNA
cctccttcagttgggacatggt

SEQ ID NO: 8628 - RNA, 22 nt, synthetic construct
  source 1..22: mol_type = other RNA
cctctagttatttcctccagaa

SEQ ID NO: 8629 - RNA, 22 nt, synthetic construct
  source 1..22: mol_type = other RNA
cctcttcatttttgacttgtag

SEQ ID NO: 8630 - RNA, 22 nt, synthetic construct
  source 1..22: mol_type = other RNA
cctctttattttctacttactt

SEQ ID NO: 8631 - RNA, 22 nt, synthetic construct
  source 1..22: mol_type = other RNA
cctgaaactccagaacacccag

SEQ ID NO: 8632 - RNA, 22 nt, synthetic construct
  source 1..22: mol_type = other RNA
ccttcagttgggacatggtctt

SEQ ID NO: 8633 - RNA, 22 nt, synthetic construct
  source 1..22: mol_type = other RNA
ccttcgtcttatggacaaagtc

SEQ ID NO: 8634 - RNA, 22 nt, synthetic construct
  source 1..22: mol_type = other RNA
ccttctttttattgttcctcta

SEQ ID NO: 8635 - RNA, 22 nt, synthetic construct
  source 1..22: mol_type = other RNA
ccttttcttcttctttgatttc

SEQ ID NO: 8636 - RNA, 22 nt, synthetic construct
  source 1..22: mol_type = other RNA
cgaagggccaaattaatgacat

SEQ ID NO: 8637 - RNA, 22 nt, synthetic construct
  source 1..22: mol_type = other RNA
cgatagatcataaaaagactga

SEQ ID NO: 8638 - RNA, 22 nt, synthetic construct
  source 1..22: mol_type = other RNA
cgatgtaaaaattttagccaat

SEQ ID NO: 8639 - RNA, 22 nt, synthetic construct
  source 1..22: mol_type = other RNA
cgctgcaaaccagtgaaatcaa

SEQ ID NO: 8640 - RNA, 22 nt, synthetic construct
  source 1..22: mol_type = other RNA
cgtctaacatagcaaatcttga

SEQ ID NO: 8641 - RNA, 22 nt, synthetic construct
  source 1..22: mol_type = other RNA
cgtcttatggacaaagtcttta

SEQ ID NO: 8642 - RNA, 22 nt, synthetic construct
  source 1..22: mol_type = other RNA
ctaaaatttttacatcgtctaa

SEQ ID NO: 8643 - RNA, 22 nt, synthetic construct
  source 1..22: mol_type = other RNA
ctaaatatttcactttttgttg

SEQ ID NO: 8644 - RNA, 22 nt, synthetic construct
  source 1..22: mol_type = other RNA
ctaacatagcaaatcttgattt

SEQ ID NO: 8645 - RNA, 22 nt, synthetic construct
  source 1..22: mol_type = other RNA
ctaactaacttaattcaaaatc

SEQ ID NO: 8646 - RNA, 22 nt, synthetic construct
  source 1..22: mol_type = other RNA
ctaacttaattcaaaatcaacc

SEQ ID NO: 8647 - RNA, 22 nt, synthetic construct
  source 1..22: mol_type = other RNA
ctacaagtcaaaaatgaagagg

SEQ ID NO: 8648 - RNA, 22 nt, synthetic construct
  source 1..22: mol_type = other RNA
ctacatataaactacaagtcaa

SEQ ID NO: 8649 - RNA, 22 nt, synthetic construct
  source 1..22: mol_type = other RNA
ctacttactttaagtgaagtta

SEQ ID NO: 8650 - RNA, 22 nt, synthetic construct
  source 1..22: mol_type = other RNA
ctacttcaacaaaaagtgaaat

SEQ ID NO: 8651 - RNA, 22 nt, synthetic construct
  source 1..22: mol_type = other RNA
ctagaagaaaaaattctacttc

SEQ ID NO: 8652 - RNA, 22 nt, synthetic construct
  source 1..22: mol_type = other RNA
ctagaggaacaataaaaagaag

SEQ ID NO: 8653 - RNA, 22 nt, synthetic construct
  source 1..22: mol_type = other RNA
ctaggaggctttcaagttttga

SEQ ID NO: 8654 - RNA, 22 nt, synthetic construct
  source 1..22: mol_type = other RNA
ctagttatttcctccagaattg

SEQ ID NO: 8655 - RNA, 22 nt, synthetic construct
  source 1..22: mol_type = other RNA
ctatcgctgcaaaccagtgaaa

SEQ ID NO: 8656 - RNA, 22 nt, synthetic construct
  source 1..22: mol_type = other RNA
ctatctccagagccaaaatcaa

SEQ ID NO: 8657 - RNA, 22 nt, synthetic construct
  source 1..22: mol_type = other RNA
ctatgttagacgatgtaaaaat

SEQ ID NO: 8658 - RNA, 22 nt, synthetic construct
  source 1..22: mol_type = other RNA
ctcaaaacttgaaagcctccta

SEQ ID NO: 8659 - RNA, 22 nt, synthetic construct
  source 1..22: mol_type = other RNA
ctcaacatatttgatcagtctt

SEQ ID NO: 8660 - RNA, 22 nt, synthetic construct
  source 1..22: mol_type = other RNA
ctcaactcaaaacttgaaagcc

SEQ ID NO: 8661 - RNA, 22 nt, synthetic construct
  source 1..22: mol_type = other RNA
ctcagttccttttcttcttctt

SEQ ID NO: 8662 - RNA, 22 nt, synthetic construct
  source 1..22: mol_type = other RNA
ctccagaacacccagaagtaac

SEQ ID NO: 8663 - RNA, 22 nt, synthetic construct
  source 1..22: mol_type = other RNA
ctccagaattgatcaagacaat

SEQ ID NO: 8664 - RNA, 22 nt, synthetic construct
  source 1..22: mol_type = other RNA
ctccagagccaaaatcaagatt

SEQ ID NO: 8665 - RNA, 22 nt, synthetic construct
  source 1..22: mol_type = other RNA
ctcctagaagaaaaaattctac

SEQ ID NO: 8666 - RNA, 22 nt, synthetic construct
  source 1..22: mol_type = other RNA
ctccttcagttgggacatggtc

SEQ ID NO: 8667 - RNA, 22 nt, synthetic construct
  source 1..22: mol_type = other RNA
ctccttctttttattgttcctc

SEQ ID NO: 8668 - RNA, 22 nt, synthetic construct
  source 1..22: mol_type = other RNA
ctctagttatttcctccagaat

SEQ ID NO: 8669 - RNA, 22 nt, synthetic construct
  source 1..22: mol_type = other RNA
ctctatctccagagccaaaatc

SEQ ID NO: 8670 - RNA, 22 nt, synthetic construct
  source 1..22: mol_type = other RNA
ctctggagatagagaatcaaat

SEQ ID NO: 8671 - RNA, 22 nt, synthetic construct
  source 1..22: mol_type = other RNA
ctcttcatttttgacttgtagt

SEQ ID NO: 8672 - RNA, 22 nt, synthetic construct
  source 1..22: mol_type = other RNA
ctcttctaaatatttcactttt

SEQ ID NO: 8673 - RNA, 22 nt, synthetic construct
  source 1..22: mol_type = other RNA
ctctttattttctacttacttt

SEQ ID NO: 8674 - RNA, 22 nt, synthetic construct
  source 1..22: mol_type = other RNA
ctgaaactccagaacacccaga

SEQ ID NO: 8675 - RNA, 22 nt, synthetic construct
  source 1..22: mol_type = other RNA
ctgaaggaggccattggctaaa

SEQ ID NO: 8676 - RNA, 22 nt, synthetic construct
  source 1..22: mol_type = other RNA
ctgagaagaactacatataaac

SEQ ID NO: 8677 - RNA, 22 nt, synthetic construct
  source 1..22: mol_type = other RNA
ctgatcaaatatgttgagtttt

SEQ ID NO: 8678 - RNA, 22 nt, synthetic construct
  source 1..22: mol_type = other RNA
ctgcaaaccagtgaaatcaaag

SEQ ID NO: 8679 - RNA, 22 nt, synthetic construct
  source 1..22: mol_type = other RNA
ctggagatagagaatcaaatga

SEQ ID NO: 8680 - RNA, 22 nt, synthetic construct
  source 1..22: mol_type = other RNA
ctggaggaaataactagaggaa

SEQ ID NO: 8681 - RNA, 22 nt, synthetic construct
  source 1..22: mol_type = other RNA
ctggagtttcaggttgattttg

SEQ ID NO: 8682 - RNA, 22 nt, synthetic construct
  source 1..22: mol_type = other RNA
ctgggtgttctggagtttcagg

SEQ ID NO: 8683 - RNA, 22 nt, synthetic construct
  source 1..22: mol_type = other RNA
ctggtttgcagcgatagatcat

SEQ ID NO: 8684 - RNA, 22 nt, synthetic construct
  source 1..22: mol_type = other RNA
cttaaagactttgtccataaga

SEQ ID NO: 8685 - RNA, 22 nt, synthetic construct
  source 1..22: mol_type = other RNA
cttaattcaaaatcaacctgaa

SEQ ID NO: 8686 - RNA, 22 nt, synthetic construct
  source 1..22: mol_type = other RNA
cttactttaagtgaagttactt

SEQ ID NO: 8687 - RNA, 22 nt, synthetic construct
  source 1..22: mol_type = other RNA
cttatggacaaagtctttaaga

SEQ ID NO: 8688 - RNA, 22 nt, synthetic construct
  source 1..22: mol_type = other RNA
cttcaacaaaaagtgaaatatt

SEQ ID NO: 8689 - RNA, 22 nt, synthetic construct
  source 1..22: mol_type = other RNA
cttcacttaaagtaagtagaaa

SEQ ID NO: 8690 - RNA, 22 nt, synthetic construct
  source 1..22: mol_type = other RNA
cttcagttgggacatggtctta

SEQ ID NO: 8691 - RNA, 22 nt, synthetic construct
  source 1..22: mol_type = other RNA
cttcatttttgacttgtagttt

SEQ ID NO: 8692 - RNA, 22 nt, synthetic construct
  source 1..22: mol_type = other RNA
cttcgtcttatggacaaagtct

SEQ ID NO: 8693 - RNA, 22 nt, synthetic construct
  source 1..22: mol_type = other RNA
cttctaaatatttcactttttg

SEQ ID NO: 8694 - RNA, 22 nt, synthetic construct
  source 1..22: mol_type = other RNA
cttctaggaggctttcaagttt

SEQ ID NO: 8695 - RNA, 22 nt, synthetic construct
  source 1..22: mol_type = other RNA
cttctcagttccttttcttctt

SEQ ID NO: 8696 - RNA, 22 nt, synthetic construct
  source 1..22: mol_type = other RNA
cttctgggtgttctggagtttc

SEQ ID NO: 8697 - RNA, 22 nt, synthetic construct
  source 1..22: mol_type = other RNA
cttcttctttgatttcactggt

SEQ ID NO: 8698 - RNA, 22 nt, synthetic construct
  source 1..22: mol_type = other RNA
cttctttgatttcactggtttg

SEQ ID NO: 8699 - RNA, 22 nt, synthetic construct
  source 1..22: mol_type = other RNA
cttctttttattgttcctctag

SEQ ID NO: 8700 - RNA, 22 nt, synthetic construct
  source 1..22: mol_type = other RNA
cttgaaagcctcctagaagaaa

SEQ ID NO: 8701 - RNA, 22 nt, synthetic construct
  source 1..22: mol_type = other RNA
cttgaactcaactcaaaacttg

SEQ ID NO: 8702 - RNA, 22 nt, synthetic construct
  source 1..22: mol_type = other RNA
cttgatcaattctggaggaaat

SEQ ID NO: 8703 - RNA, 22 nt, synthetic construct
  source 1..22: mol_type = other RNA
cttgattttggctctggagata

SEQ ID NO: 8704 - RNA, 22 nt, synthetic construct
  source 1..22: mol_type = other RNA
cttgtagtttatatgtagttct

SEQ ID NO: 8705 - RNA, 22 nt, synthetic construct
  source 1..22: mol_type = other RNA
ctttaagaccatgtcccaactg

SEQ ID NO: 8706 - RNA, 22 nt, synthetic construct
  source 1..22: mol_type = other RNA
ctttaagtgaagttacttctgg

SEQ ID NO: 8707 - RNA, 22 nt, synthetic construct
  source 1..22: mol_type = other RNA
ctttacctcttcatttttgact

SEQ ID NO: 8708 - RNA, 22 nt, synthetic construct
  source 1..22: mol_type = other RNA
ctttcaagttttgagttgagtt

SEQ ID NO: 8709 - RNA, 22 nt, synthetic construct
  source 1..22: mol_type = other RNA
ctttgatttcactggtttgcag

SEQ ID NO: 8710 - RNA, 22 nt, synthetic construct
  source 1..22: mol_type = other RNA
ctttgtccataagacgaagggc

SEQ ID NO: 8711 - RNA, 22 nt, synthetic construct
  source 1..22: mol_type = other RNA
cttttcttcttctttgatttca

SEQ ID NO: 8712 - RNA, 22 nt, synthetic construct
  source 1..22: mol_type = other RNA
ctttttatgatctatcgctgca

SEQ ID NO: 8713 - RNA, 22 nt, synthetic construct
  source 1..22: mol_type = other RNA
ctttttattgttcctctagtta

SEQ ID NO: 8714 - RNA, 22 nt, synthetic construct
  source 1..22: mol_type = other RNA
ctttttgttgaagtagaatttt

SEQ ID NO: 8715 - RNA, 22 nt, synthetic construct
  source 1..22: mol_type = other RNA
gaaaaaattctacttcaacaaa

SEQ ID NO: 8716 - RNA, 22 nt, synthetic construct
  source 1..22: mol_type = other RNA
gaaaaggaactgagaagaacta

SEQ ID NO: 8717 - RNA, 22 nt, synthetic construct
  source 1..22: mol_type = other RNA
gaaactccagaacacccagaag

SEQ ID NO: 8718 - RNA, 22 nt, synthetic construct
  source 1..22: mol_type = other RNA
gaaagcctcctagaagaaaaaa

SEQ ID NO: 8719 - RNA, 22 nt, synthetic construct
  source 1..22: mol_type = other RNA
gaaataactagaggaacaataa

SEQ ID NO: 8720 - RNA, 22 nt, synthetic construct
  source 1..22: mol_type = other RNA
gaaatatgtcattaatttggcc

SEQ ID NO: 8721 - RNA, 22 nt, synthetic construct
  source 1..22: mol_type = other RNA
gaaatatttagaagagcaacta

SEQ ID NO: 8722 - RNA, 22 nt, synthetic construct
  source 1..22: mol_type = other RNA
gaaatcaaagaagaagaaaagg

SEQ ID NO: 8723 - RNA, 22 nt, synthetic construct
  source 1..22: mol_type = other RNA
gaacaataaaaagaaggagctt

SEQ ID NO: 8724 - RNA, 22 nt, synthetic construct
  source 1..22: mol_type = other RNA
gaacacccagaagtaacttcac

SEQ ID NO: 8725 - RNA, 22 nt, synthetic construct
  source 1..22: mol_type = other RNA
gaaccctctttattttctactt

SEQ ID NO: 8726 - RNA, 22 nt, synthetic construct
  source 1..22: mol_type = other RNA
gaactacatataaactacaagt

SEQ ID NO: 8727 - RNA, 22 nt, synthetic construct
  source 1..22: mol_type = other RNA
gaactcaactcaaaacttgaaa

SEQ ID NO: 8728 - RNA, 22 nt, synthetic construct
  source 1..22: mol_type = other RNA
gaactgagaagaactacatata

SEQ ID NO: 8729 - RNA, 22 nt, synthetic construct
  source 1..22: mol_type = other RNA
gaagaaaaaattctacttcaac

SEQ ID NO: 8730 - RNA, 22 nt, synthetic construct
  source 1..22: mol_type = other RNA
gaagaaaaggaactgagaagaa

SEQ ID NO: 8731 - RNA, 22 nt, synthetic construct
  source 1..22: mol_type = other RNA
gaagaactacatataaactaca

SEQ ID NO: 8732 - RNA, 22 nt, synthetic construct
  source 1..22: mol_type = other RNA
gaagaagaaaaggaactgagaa

SEQ ID NO: 8733 - RNA, 22 nt, synthetic construct
  source 1..22: mol_type = other RNA
gaagagcaactaactaacttaa

SEQ ID NO: 8734 - RNA, 22 nt, synthetic construct
  source 1..22: mol_type = other RNA
gaagaggtaaagaatatgtcac

SEQ ID NO: 8735 - RNA, 22 nt, synthetic construct
  source 1..22: mol_type = other RNA
gaaggaggccattggctaaaat

SEQ ID NO: 8736 - RNA, 22 nt, synthetic construct
  source 1..22: mol_type = other RNA
gaagggccaaattaatgacata

SEQ ID NO: 8737 - RNA, 22 nt, synthetic construct
  source 1..22: mol_type = other RNA
gaagtaacttcacttaaagtaa

SEQ ID NO: 8738 - RNA, 22 nt, synthetic construct
  source 1..22: mol_type = other RNA
gaagtagaattttttcttctag

SEQ ID NO: 8739 - RNA, 22 nt, synthetic construct
  source 1..22: mol_type = other RNA
gaagttacttctgggtgttctg

SEQ ID NO: 8740 - RNA, 22 nt, synthetic construct
  source 1..22: mol_type = other RNA
gaatatgtcacttgaactcaac

SEQ ID NO: 8741 - RNA, 22 nt, synthetic construct
  source 1..22: mol_type = other RNA
gaatcaaatgatgaattgtctt

SEQ ID NO: 8742 - RNA, 22 nt, synthetic construct
  source 1..22: mol_type = other RNA
gaattaagttagttagttgctc

SEQ ID NO: 8743 - RNA, 22 nt, synthetic construct
  source 1..22: mol_type = other RNA
gaattgatcaagacaattcatc

SEQ ID NO: 8744 - RNA, 22 nt, synthetic construct
  source 1..22: mol_type = other RNA
gaattgtcttgatcaattctgg

SEQ ID NO: 8745 - RNA, 22 nt, synthetic construct
  source 1..22: mol_type = other RNA
gaattttttcttctaggaggct

SEQ ID NO: 8746 - RNA, 22 nt, synthetic construct
  source 1..22: mol_type = other RNA
gacaaagtctttaagaccatgt

SEQ ID NO: 8747 - RNA, 22 nt, synthetic construct
  source 1..22: mol_type = other RNA
gacaattcatcatttgattctc

SEQ ID NO: 8748 - RNA, 22 nt, synthetic construct
  source 1..22: mol_type = other RNA
gacatattctttacctcttcat

SEQ ID NO: 8749 - RNA, 22 nt, synthetic construct
  source 1..22: mol_type = other RNA
gacatatttcaaaaactcaaca

SEQ ID NO: 8750 - RNA, 22 nt, synthetic construct
  source 1..22: mol_type = other RNA
gacatggtcttaaagactttgt

SEQ ID NO: 8751 - RNA, 22 nt, synthetic construct
  source 1..22: mol_type = other RNA
gaccatgtcccaactgaaggag

SEQ ID NO: 8752 - RNA, 22 nt, synthetic construct
  source 1..22: mol_type = other RNA
gacgaagggccaaattaatgac

SEQ ID NO: 8753 - RNA, 22 nt, synthetic construct
  source 1..22: mol_type = other RNA
gacgatgtaaaaattttagcca

SEQ ID NO: 8754 - RNA, 22 nt, synthetic construct
  source 1..22: mol_type = other RNA
gactgatcaaatatgttgagtt

SEQ ID NO: 8755 - RNA, 22 nt, synthetic construct
  source 1..22: mol_type = other RNA
gacttgtagtttatatgtagtt

SEQ ID NO: 8756 - RNA, 22 nt, synthetic construct
  source 1..22: mol_type = other RNA
gactttgtccataagacgaagg

SEQ ID NO: 8757 - RNA, 22 nt, synthetic construct
  source 1..22: mol_type = other RNA
gagaagaactacatataaacta

SEQ ID NO: 8758 - RNA, 22 nt, synthetic construct
  source 1..22: mol_type = other RNA
gagaatcaaatgatgaattgtc

SEQ ID NO: 8759 - RNA, 22 nt, synthetic construct
  source 1..22: mol_type = other RNA
gagatagagaatcaaatgatga

SEQ ID NO: 8760 - RNA, 22 nt, synthetic construct
  source 1..22: mol_type = other RNA
gagcaactaactaacttaattc

SEQ ID NO: 8761 - RNA, 22 nt, synthetic construct
  source 1..22: mol_type = other RNA
gagccaaaatcaagatttgcta

SEQ ID NO: 8762 - RNA, 22 nt, synthetic construct
  source 1..22: mol_type = other RNA
gaggaaataactagaggaacaa

SEQ ID NO: 8763 - RNA, 22 nt, synthetic construct
  source 1..22: mol_type = other RNA
gaggaacaataaaaagaaggag

SEQ ID NO: 8764 - RNA, 22 nt, synthetic construct
  source 1..22: mol_type = other RNA
gaggccattggctaaaattttt

SEQ ID NO: 8765 - RNA, 22 nt, synthetic construct
  source 1..22: mol_type = other RNA
gaggctttcaagttttgagttg

SEQ ID NO: 8766 - RNA, 22 nt, synthetic construct
  source 1..22: mol_type = other RNA
gaggtaaagaatatgtcacttg

SEQ ID NO: 8767 - RNA, 22 nt, synthetic construct
  source 1..22: mol_type = other RNA
gagttcaagtgacatattcttt

SEQ ID NO: 8768 - RNA, 22 nt, synthetic construct
  source 1..22: mol_type = other RNA
gagttgagttcaagtgacatat

SEQ ID NO: 8769 - RNA, 22 nt, synthetic construct
  source 1..22: mol_type = other RNA
gagtttcaggttgattttgaat

SEQ ID NO: 8770 - RNA, 22 nt, synthetic construct
  source 1..22: mol_type = other RNA
gagtttttgaaatatgtcatta

SEQ ID NO: 8771 - RNA, 22 nt, synthetic construct
  source 1..22: mol_type = other RNA
gatagagaatcaaatgatgaat

SEQ ID NO: 8772 - RNA, 22 nt, synthetic construct
  source 1..22: mol_type = other RNA
gatagatcataaaaagactgat

SEQ ID NO: 8773 - RNA, 22 nt, synthetic construct
  source 1..22: mol_type = other RNA
gatcaaatatgttgagtttttg

SEQ ID NO: 8774 - RNA, 22 nt, synthetic construct
  source 1..22: mol_type = other RNA
gatcaagacaattcatcatttg

SEQ ID NO: 8775 - RNA, 22 nt, synthetic construct
  source 1..22: mol_type = other RNA
gatcaattctggaggaaataac

SEQ ID NO: 8776 - RNA, 22 nt, synthetic construct
  source 1..22: mol_type = other RNA
gatcagtctttttatgatctat

SEQ ID NO: 8777 - RNA, 22 nt, synthetic construct
  source 1..22: mol_type = other RNA
gatcataaaaagactgatcaaa

SEQ ID NO: 8778 - RNA, 22 nt, synthetic construct
  source 1..22: mol_type = other RNA
gatctatcgctgcaaaccagtg

SEQ ID NO: 8779 - RNA, 22 nt, synthetic construct
  source 1..22: mol_type = other RNA
gatgaattgtcttgatcaattc

SEQ ID NO: 8780 - RNA, 22 nt, synthetic construct
  source 1..22: mol_type = other RNA
gatgtaaaaattttagccaatg

SEQ ID NO: 8781 - RNA, 22 nt, synthetic construct
  source 1..22: mol_type = other RNA
gattctctatctccagagccaa

SEQ ID NO: 8782 - RNA, 22 nt, synthetic construct
  source 1..22: mol_type = other RNA
gatttcactggtttgcagcgat

SEQ ID NO: 8783 - RNA, 22 nt, synthetic construct
  source 1..22: mol_type = other RNA
gatttgctatgttagacgatgt

SEQ ID NO: 8784 - RNA, 22 nt, synthetic construct
  source 1..22: mol_type = other RNA
gattttgaattaagttagttag

SEQ ID NO: 8785 - RNA, 22 nt, synthetic construct
  source 1..22: mol_type = other RNA
gattttggctctggagatagag

SEQ ID NO: 8786 - RNA, 22 nt, synthetic construct
  source 1..22: mol_type = other RNA
gcaaaccagtgaaatcaaagaa

SEQ ID NO: 8787 - RNA, 22 nt, synthetic construct
  source 1..22: mol_type = other RNA
gcaaatcttgattttggctctg

SEQ ID NO: 8788 - RNA, 22 nt, synthetic construct
  source 1..22: mol_type = other RNA
gcaactaactaacttaattcaa

SEQ ID NO: 8789 - RNA, 22 nt, synthetic construct
  source 1..22: mol_type = other RNA
gcagcgatagatcataaaaaga

SEQ ID NO: 8790 - RNA, 22 nt, synthetic construct
  source 1..22: mol_type = other RNA
gccaaaatcaagatttgctatg

SEQ ID NO: 8791 - RNA, 22 nt, synthetic construct
  source 1..22: mol_type = other RNA
gccaaattaatgacatatttca

SEQ ID NO: 8792 - RNA, 22 nt, synthetic construct
  source 1..22: mol_type = other RNA
gccaatggcctccttcagttgg

SEQ ID NO: 8793 - RNA, 22 nt, synthetic construct
  source 1..22: mol_type = other RNA
gccattggctaaaatttttaca

SEQ ID NO: 8794 - RNA, 22 nt, synthetic construct
  source 1..22: mol_type = other RNA
gcccttcgtcttatggacaaag

SEQ ID NO: 8795 - RNA, 22 nt, synthetic construct
  source 1..22: mol_type = other RNA
gcctcctagaagaaaaaattct

SEQ ID NO: 8796 - RNA, 22 nt, synthetic construct
  source 1..22: mol_type = other RNA
gcctccttcagttgggacatgg

SEQ ID NO: 8797 - RNA, 22 nt, synthetic construct
  source 1..22: mol_type = other RNA
gcgatagatcataaaaagactg

SEQ ID NO: 8798 - RNA, 22 nt, synthetic construct
  source 1..22: mol_type = other RNA
gctaaaatttttacatcgtcta

SEQ ID NO: 8799 - RNA, 22 nt, synthetic construct
  source 1..22: mol_type = other RNA
gctatgttagacgatgtaaaaa

SEQ ID NO: 8800 - RNA, 22 nt, synthetic construct
  source 1..22: mol_type = other RNA
gctccttctttttattgttcct

SEQ ID NO: 8801 - RNA, 22 nt, synthetic construct
  source 1..22: mol_type = other RNA
gctctggagatagagaatcaaa

SEQ ID NO: 8802 - RNA, 22 nt, synthetic construct
  source 1..22: mol_type = other RNA
gctcttctaaatatttcacttt

SEQ ID NO: 8803 - RNA, 22 nt, synthetic construct
  source 1..22: mol_type = other RNA
gctgcaaaccagtgaaatcaaa

SEQ ID NO: 8804 - RNA, 22 nt, synthetic construct
  source 1..22: mol_type = other RNA
gctttcaagttttgagttgagt

SEQ ID NO: 8805 - RNA, 22 nt, synthetic construct
  source 1..22: mol_type = other RNA
ggaaataactagaggaacaata

SEQ ID NO: 8806 - RNA, 22 nt, synthetic construct
  source 1..22: mol_type = other RNA
ggaacaataaaaagaaggagct

SEQ ID NO: 8807 - RNA, 22 nt, synthetic construct
  source 1..22: mol_type = other RNA
ggaactgagaagaactacatat

SEQ ID NO: 8808 - RNA, 22 nt, synthetic construct
  source 1..22: mol_type = other RNA
ggacaaagtctttaagaccatg

SEQ ID NO: 8809 - RNA, 22 nt, synthetic construct
  source 1..22: mol_type = other RNA
ggacatggtcttaaagactttg

SEQ ID NO: 8810 - RNA, 22 nt, synthetic construct
  source 1..22: mol_type = other RNA
ggagatagagaatcaaatgatg

SEQ ID NO: 8811 - RNA, 22 nt, synthetic construct
  source 1..22: mol_type = other RNA
ggaggaaataactagaggaaca

SEQ ID NO: 8812 - RNA, 22 nt, synthetic construct
  source 1..22: mol_type = other RNA
ggaggccattggctaaaatttt

SEQ ID NO: 8813 - RNA, 22 nt, synthetic construct
  source 1..22: mol_type = other RNA
ggaggctttcaagttttgagtt

SEQ ID NO: 8814 - RNA, 22 nt, synthetic construct
  source 1..22: mol_type = other RNA
ggagtttcaggttgattttgaa

SEQ ID NO: 8815 - RNA, 22 nt, synthetic construct
  source 1..22: mol_type = other RNA
ggccaaattaatgacatatttc

SEQ ID NO: 8816 - RNA, 22 nt, synthetic construct
  source 1..22: mol_type = other RNA
ggccattggctaaaatttttac

SEQ ID NO: 8817 - RNA, 22 nt, synthetic construct
  source 1..22: mol_type = other RNA
ggcccttcgtcttatggacaaa

SEQ ID NO: 8818 - RNA, 22 nt, synthetic construct
  source 1..22: mol_type = other RNA
ggcctccttcagttgggacatg

SEQ ID NO: 8819 - RNA, 22 nt, synthetic construct
  source 1..22: mol_type = other RNA
ggctaaaatttttacatcgtct

SEQ ID NO: 8820 - RNA, 22 nt, synthetic construct
  source 1..22: mol_type = other RNA
ggctctggagatagagaatcaa

SEQ ID NO: 8821 - RNA, 22 nt, synthetic construct
  source 1..22: mol_type = other RNA
ggctttcaagttttgagttgag

SEQ ID NO: 8822 - RNA, 22 nt, synthetic construct
  source 1..22: mol_type = other RNA
gggacatggtcttaaagacttt

SEQ ID NO: 8823 - RNA, 22 nt, synthetic construct
  source 1..22: mol_type = other RNA
gggccaaattaatgacatattt

SEQ ID NO: 8824 - RNA, 22 nt, synthetic construct
  source 1..22: mol_type = other RNA
gggtgttctggagtttcaggtt

SEQ ID NO: 8825 - RNA, 22 nt, synthetic construct
  source 1..22: mol_type = other RNA
ggtaaagaatatgtcacttgaa

SEQ ID NO: 8826 - RNA, 22 nt, synthetic construct
  source 1..22: mol_type = other RNA
ggtcttaaagactttgtccata

SEQ ID NO: 8827 - RNA, 22 nt, synthetic construct
  source 1..22: mol_type = other RNA
ggtgttctggagtttcaggttg

SEQ ID NO: 8828 - RNA, 22 nt, synthetic construct
  source 1..22: mol_type = other RNA
ggttgattttgaattaagttag

SEQ ID NO: 8829 - RNA, 22 nt, synthetic construct
  source 1..22: mol_type = other RNA
ggtttgcagcgatagatcataa

SEQ ID NO: 8830 - RNA, 22 nt, synthetic construct
  source 1..22: mol_type = other RNA
gtaaaaattttagccaatggcc

SEQ ID NO: 8831 - RNA, 22 nt, synthetic construct
  source 1..22: mol_type = other RNA
gtaaagaatatgtcacttgaac

SEQ ID NO: 8832 - RNA, 22 nt, synthetic construct
  source 1..22: mol_type = other RNA
gtaacttcacttaaagtaagta

SEQ ID NO: 8833 - RNA, 22 nt, synthetic construct
  source 1..22: mol_type = other RNA
gtaagtagaaaataaagagggt

SEQ ID NO: 8834 - RNA, 22 nt, synthetic construct
  source 1..22: mol_type = other RNA
gtagaattttttcttctaggag

SEQ ID NO: 8835 - RNA, 22 nt, synthetic construct
  source 1..22: mol_type = other RNA
gtagttcttctcagttcctttt

SEQ ID NO: 8836 - RNA, 22 nt, synthetic construct
  source 1..22: mol_type = other RNA
gtagtttatatgtagttcttct

SEQ ID NO: 8837 - RNA, 22 nt, synthetic construct
  source 1..22: mol_type = other RNA
gtcaaaaatgaagaggtaaaga

SEQ ID NO: 8838 - RNA, 22 nt, synthetic construct
  source 1..22: mol_type = other RNA
gtcacttgaactcaactcaaaa

SEQ ID NO: 8839 - RNA, 22 nt, synthetic construct
  source 1..22: mol_type = other RNA
gtcattaatttggcccttcgtc

SEQ ID NO: 8840 - RNA, 22 nt, synthetic construct
  source 1..22: mol_type = other RNA
gtccataagacgaagggccaaa

SEQ ID NO: 8841 - RNA, 22 nt, synthetic construct
  source 1..22: mol_type = other RNA
gtcccaactgaaggaggccatt

SEQ ID NO: 8842 - RNA, 22 nt, synthetic construct
  source 1..22: mol_type = other RNA
gtctaacatagcaaatcttgat

SEQ ID NO: 8843 - RNA, 22 nt, synthetic construct
  source 1..22: mol_type = other RNA
gtcttaaagactttgtccataa

SEQ ID NO: 8844 - RNA, 22 nt, synthetic construct
  source 1..22: mol_type = other RNA
gtcttatggacaaagtctttaa

SEQ ID NO: 8845 - RNA, 22 nt, synthetic construct
  source 1..22: mol_type = other RNA
gtcttgatcaattctggaggaa

SEQ ID NO: 8846 - RNA, 22 nt, synthetic construct
  source 1..22: mol_type = other RNA
gtctttaagaccatgtcccaac

SEQ ID NO: 8847 - RNA, 22 nt, synthetic construct
  source 1..22: mol_type = other RNA
gtctttttatgatctatcgctg

SEQ ID NO: 8848 - RNA, 22 nt, synthetic construct
  source 1..22: mol_type = other RNA
gtgaaatatttagaagagcaac

SEQ ID NO: 8849 - RNA, 22 nt, synthetic construct
  source 1..22: mol_type = other RNA
gtgaaatcaaagaagaagaaaa

SEQ ID NO: 8850 - RNA, 22 nt, synthetic construct
  source 1..22: mol_type = other RNA
gtgaagttacttctgggtgttc

SEQ ID NO: 8851 - RNA, 22 nt, synthetic construct
  source 1..22: mol_type = other RNA
gtgacatattctttacctcttc

SEQ ID NO: 8852 - RNA, 22 nt, synthetic construct
  source 1..22: mol_type = other RNA
gtgttctggagtttcaggttga

SEQ ID NO: 8853 - RNA, 22 nt, synthetic construct
  source 1..22: mol_type = other RNA
gttacttctgggtgttctggag

SEQ ID NO: 8854 - RNA, 22 nt, synthetic construct
  source 1..22: mol_type = other RNA
gttagacgatgtaaaaatttta

SEQ ID NO: 8855 - RNA, 22 nt, synthetic construct
  source 1..22: mol_type = other RNA
gttagttagttgctcttctaaa

SEQ ID NO: 8856 - RNA, 22 nt, synthetic construct
  source 1..22: mol_type = other RNA
gttagttgctcttctaaatatt

SEQ ID NO: 8857 - RNA, 22 nt, synthetic construct
  source 1..22: mol_type = other RNA
gttatttcctccagaattgatc

SEQ ID NO: 8858 - RNA, 22 nt, synthetic construct
  source 1..22: mol_type = other RNA
gttcaagtgacatattctttac

SEQ ID NO: 8859 - RNA, 22 nt, synthetic construct
  source 1..22: mol_type = other RNA
gttcacaattaagctccttctt

SEQ ID NO: 8860 - RNA, 22 nt, synthetic construct
  source 1..22: mol_type = other RNA
gttcctctagttatttcctcca

SEQ ID NO: 8861 - RNA, 22 nt, synthetic construct
  source 1..22: mol_type = other RNA
gttccttttcttcttctttgat

SEQ ID NO: 8862 - RNA, 22 nt, synthetic construct
  source 1..22: mol_type = other RNA
gttctggagtttcaggttgatt

SEQ ID NO: 8863 - RNA, 22 nt, synthetic construct
  source 1..22: mol_type = other RNA
gttcttctcagttccttttctt

SEQ ID NO: 8864 - RNA, 22 nt, synthetic construct
  source 1..22: mol_type = other RNA
gttgaagtagaattttttcttc

SEQ ID NO: 8865 - RNA, 22 nt, synthetic construct
  source 1..22: mol_type = other RNA
gttgagttcaagtgacatattc

SEQ ID NO: 8866 - RNA, 22 nt, synthetic construct
  source 1..22: mol_type = other RNA
gttgagtttttgaaatatgtca

SEQ ID NO: 8867 - RNA, 22 nt, synthetic construct
  source 1..22: mol_type = other RNA
gttgattttgaattaagttagt

SEQ ID NO: 8868 - RNA, 22 nt, synthetic construct
  source 1..22: mol_type = other RNA
gttgctcttctaaatatttcac

SEQ ID NO: 8869 - RNA, 22 nt, synthetic construct
  source 1..22: mol_type = other RNA
gttgggacatggtcttaaagac

SEQ ID NO: 8870 - RNA, 22 nt, synthetic construct
  source 1..22: mol_type = other RNA
gtttatatgtagttcttctcag

SEQ ID NO: 8871 - RNA, 22 nt, synthetic construct
  source 1..22: mol_type = other RNA
gtttcaggttgattttgaatta

SEQ ID NO: 8872 - RNA, 22 nt, synthetic construct
  source 1..22: mol_type = other RNA
gtttgcagcgatagatcataaa

SEQ ID NO: 8873 - RNA, 22 nt, synthetic construct
  source 1..22: mol_type = other RNA
gttttgagttgagttcaagtga

SEQ ID NO: 8874 - RNA, 22 nt, synthetic construct
  source 1..22: mol_type = other RNA
taaaaagaaggagcttaattgt

SEQ ID NO: 8875 - RNA, 22 nt, synthetic construct
  source 1..22: mol_type = other RNA
taaaaagactgatcaaatatgt

SEQ ID NO: 8876 - RNA, 22 nt, synthetic construct
  source 1..22: mol_type = other RNA
taaaaattttagccaatggcct

SEQ ID NO: 8877 - RNA, 22 nt, synthetic construct
  source 1..22: mol_type = other RNA
taaaatttttacatcgtctaac

SEQ ID NO: 8878 - RNA, 22 nt, synthetic construct
  source 1..22: mol_type = other RNA
taaactacaagtcaaaaatgaa

SEQ ID NO: 8879 - RNA, 22 nt, synthetic construct
  source 1..22: mol_type = other RNA
taaagaatatgtcacttgaact

SEQ ID NO: 8880 - RNA, 22 nt, synthetic construct
  source 1..22: mol_type = other RNA
taaagactttgtccataagacg

SEQ ID NO: 8881 - RNA, 22 nt, synthetic construct
  source 1..22: mol_type = other RNA
taacatagcaaatcttgatttt

SEQ ID NO: 8882 - RNA, 22 nt, synthetic construct
  source 1..22: mol_type = other RNA
taactagaggaacaataaaaag

SEQ ID NO: 8883 - RNA, 22 nt, synthetic construct
  source 1..22: mol_type = other RNA
taacttaattcaaaatcaacct

SEQ ID NO: 8884 - RNA, 22 nt, synthetic construct
  source 1..22: mol_type = other RNA
taacttcacttaaagtaagtag

SEQ ID NO: 8885 - RNA, 22 nt, synthetic construct
  source 1..22: mol_type = other RNA
taagaccatgtcccaactgaag

SEQ ID NO: 8886 - RNA, 22 nt, synthetic construct
  source 1..22: mol_type = other RNA
taagacgaagggccaaattaat

SEQ ID NO: 8887 - RNA, 22 nt, synthetic construct
  source 1..22: mol_type = other RNA
taagctccttctttttattgtt

SEQ ID NO: 8888 - RNA, 22 nt, synthetic construct
  source 1..22: mol_type = other RNA
taagtgaagttacttctgggtg

SEQ ID NO: 8889 - RNA, 22 nt, synthetic construct
  source 1..22: mol_type = other RNA
taagttagttagttgctcttct

SEQ ID NO: 8890 - RNA, 22 nt, synthetic construct
  source 1..22: mol_type = other RNA
taatgacatatttcaaaaactc

SEQ ID NO: 8891 - RNA, 22 nt, synthetic construct
  source 1..22: mol_type = other RNA
taattcaaaatcaacctgaaac

SEQ ID NO: 8892 - RNA, 22 nt, synthetic construct
  source 1..22: mol_type = other RNA
taatttggcccttcgtcttatg

SEQ ID NO: 8893 - RNA, 22 nt, synthetic construct
  source 1..22: mol_type = other RNA
tacaagtcaaaaatgaagaggt

SEQ ID NO: 8894 - RNA, 22 nt, synthetic construct
  source 1..22: mol_type = other RNA
tacatataaactacaagtcaaa

SEQ ID NO: 8895 - RNA, 22 nt, synthetic construct
  source 1..22: mol_type = other RNA
tacatcgtctaacatagcaaat

SEQ ID NO: 8896 - RNA, 22 nt, synthetic construct
  source 1..22: mol_type = other RNA
tacctcttcatttttgacttgt

SEQ ID NO: 8897 - RNA, 22 nt, synthetic construct
  source 1..22: mol_type = other RNA
tacttactttaagtgaagttac

SEQ ID NO: 8898 - RNA, 22 nt, synthetic construct
  source 1..22: mol_type = other RNA
tacttcaacaaaaagtgaaata

SEQ ID NO: 8899 - RNA, 22 nt, synthetic construct
  source 1..22: mol_type = other RNA
tacttctgggtgttctggagtt

SEQ ID NO: 8900 - RNA, 22 nt, synthetic construct
  source 1..22: mol_type = other RNA
tactttaagtgaagttacttct

SEQ ID NO: 8901 - RNA, 22 nt, synthetic construct
  source 1..22: mol_type = other RNA
tagaagaaaaaattctacttca

SEQ ID NO: 8902 - RNA, 22 nt, synthetic construct
  source 1..22: mol_type = other RNA
tagaagagcaactaactaactt

SEQ ID NO: 8903 - RNA, 22 nt, synthetic construct
  source 1..22: mol_type = other RNA
tagaattttttcttctaggagg

SEQ ID NO: 8904 - RNA, 22 nt, synthetic construct
  source 1..22: mol_type = other RNA
tagacgatgtaaaaattttagc

SEQ ID NO: 8905 - RNA, 22 nt, synthetic construct
  source 1..22: mol_type = other RNA
tagagaatcaaatgatgaattg

SEQ ID NO: 8906 - RNA, 22 nt, synthetic construct
  source 1..22: mol_type = other RNA
tagaggaacaataaaaagaagg

SEQ ID NO: 8907 - RNA, 22 nt, synthetic construct
  source 1..22: mol_type = other RNA
tagatcataaaaagactgatca

SEQ ID NO: 8908 - RNA, 22 nt, synthetic construct
  source 1..22: mol_type = other RNA
tagcaaatcttgattttggctc

SEQ ID NO: 8909 - RNA, 22 nt, synthetic construct
  source 1..22: mol_type = other RNA
tagccaatggcctccttcagtt

SEQ ID NO: 8910 - RNA, 22 nt, synthetic construct
  source 1..22: mol_type = other RNA
taggaggctttcaagttttgag

SEQ ID NO: 8911 - RNA, 22 nt, synthetic construct
  source 1..22: mol_type = other RNA
tagttagttgctcttctaaata

SEQ ID NO: 8912 - RNA, 22 nt, synthetic construct
  source 1..22: mol_type = other RNA
tagttatttcctccagaattga

SEQ ID NO: 8913 - RNA, 22 nt, synthetic construct
  source 1..22: mol_type = other RNA
tagttcttctcagttccttttc

SEQ ID NO: 8914 - RNA, 22 nt, synthetic construct
  source 1..22: mol_type = other RNA
tagttgctcttctaaatatttc

SEQ ID NO: 8915 - RNA, 22 nt, synthetic construct
  source 1..22: mol_type = other RNA
tagtttatatgtagttcttctc

SEQ ID NO: 8916 - RNA, 22 nt, synthetic construct
  source 1..22: mol_type = other RNA
tataaactacaagtcaaaaatg

SEQ ID NO: 8917 - RNA, 22 nt, synthetic construct
  source 1..22: mol_type = other RNA
tatatgtagttcttctcagttc

SEQ ID NO: 8918 - RNA, 22 nt, synthetic construct
  source 1..22: mol_type = other RNA
tatcgctgcaaaccagtgaaat

SEQ ID NO: 8919 - RNA, 22 nt, synthetic construct
  source 1..22: mol_type = other RNA
tatctccagagccaaaatcaag

SEQ ID NO: 8920 - RNA, 22 nt, synthetic construct
  source 1..22: mol_type = other RNA
tatgatctatcgctgcaaacca

SEQ ID NO: 8921 - RNA, 22 nt, synthetic construct
  source 1..22: mol_type = other RNA
tatggacaaagtctttaagacc

SEQ ID NO: 8922 - RNA, 22 nt, synthetic construct
  source 1..22: mol_type = other RNA
tatgtagttcttctcagttcct

SEQ ID NO: 8923 - RNA, 22 nt, synthetic construct
  source 1..22: mol_type = other RNA
tatgtcacttgaactcaactca

SEQ ID NO: 8924 - RNA, 22 nt, synthetic construct
  source 1..22: mol_type = other RNA
tatgtcattaatttggcccttc

SEQ ID NO: 8925 - RNA, 22 nt, synthetic construct
  source 1..22: mol_type = other RNA
tatgttagacgatgtaaaaatt

SEQ ID NO: 8926 - RNA, 22 nt, synthetic construct
  source 1..22: mol_type = other RNA
tatgttgagtttttgaaatatg

SEQ ID NO: 8927 - RNA, 22 nt, synthetic construct
  source 1..22: mol_type = other RNA
tattctttacctcttcattttt

SEQ ID NO: 8928 - RNA, 22 nt, synthetic construct
  source 1..22: mol_type = other RNA
tattgttcctctagttatttcc

SEQ ID NO: 8929 - RNA, 22 nt, synthetic construct
  source 1..22: mol_type = other RNA
tatttagaagagcaactaacta

SEQ ID NO: 8930 - RNA, 22 nt, synthetic construct
  source 1..22: mol_type = other RNA
tatttcactttttgttgaagta

SEQ ID NO: 8931 - RNA, 22 nt, synthetic construct
  source 1..22: mol_type = other RNA
tatttcctccagaattgatcaa

SEQ ID NO: 8932 - RNA, 22 nt, synthetic construct
  source 1..22: mol_type = other RNA
tatttgatcagtctttttatga

SEQ ID NO: 8933 - RNA, 22 nt, synthetic construct
  source 1..22: mol_type = other RNA
tattttctacttactttaagtg

SEQ ID NO: 8934 - RNA, 22 nt, synthetic construct
  source 1..22: mol_type = other RNA
tcaaaaactcaacatatttgat

SEQ ID NO: 8935 - RNA, 22 nt, synthetic construct
  source 1..22: mol_type = other RNA
tcaaaaatgaagaggtaaagaa

SEQ ID NO: 8936 - RNA, 22 nt, synthetic construct
  source 1..22: mol_type = other RNA
tcaaaacttgaaagcctcctag

SEQ ID NO: 8937 - RNA, 22 nt, synthetic construct
  source 1..22: mol_type = other RNA
tcaaaatcaacctgaaactcca

SEQ ID NO: 8938 - RNA, 22 nt, synthetic construct
  source 1..22: mol_type = other RNA
tcaaagaagaagaaaaggaact

SEQ ID NO: 8939 - RNA, 22 nt, synthetic construct
  source 1..22: mol_type = other RNA
tcaaatatgttgagtttttgaa

SEQ ID NO: 8940 - RNA, 22 nt, synthetic construct
  source 1..22: mol_type = other RNA
tcaaatgatgaattgtcttgat

SEQ ID NO: 8941 - RNA, 22 nt, synthetic construct
  source 1..22: mol_type = other RNA
tcaacatatttgatcagtcttt

SEQ ID NO: 8942 - RNA, 22 nt, synthetic construct
  source 1..22: mol_type = other RNA
tcaacctgaaactccagaacac

SEQ ID NO: 8943 - RNA, 22 nt, synthetic construct
  source 1..22: mol_type = other RNA
tcaactcaaaacttgaaagcct

SEQ ID NO: 8944 - RNA, 22 nt, synthetic construct
  source 1..22: mol_type = other RNA
tcaagacaattcatcatttgat

SEQ ID NO: 8945 - RNA, 22 nt, synthetic construct
  source 1..22: mol_type = other RNA
tcaagatttgctatgttagacg

SEQ ID NO: 8946 - RNA, 22 nt, synthetic construct
  source 1..22: mol_type = other RNA
tcaagtgacatattctttacct

SEQ ID NO: 8947 - RNA, 22 nt, synthetic construct
  source 1..22: mol_type = other RNA
tcaagttttgagttgagttcaa

SEQ ID NO: 8948 - RNA, 22 nt, synthetic construct
  source 1..22: mol_type = other RNA
tcaattctggaggaaataacta

SEQ ID NO: 8949 - RNA, 22 nt, synthetic construct
  source 1..22: mol_type = other RNA
tcacaattaagctccttctttt

SEQ ID NO: 8950 - RNA, 22 nt, synthetic construct
  source 1..22: mol_type = other RNA
tcactggtttgcagcgatagat

SEQ ID NO: 8951 - RNA, 22 nt, synthetic construct
  source 1..22: mol_type = other RNA
tcacttaaagtaagtagaaaat

SEQ ID NO: 8952 - RNA, 22 nt, synthetic construct
  source 1..22: mol_type = other RNA
tcacttgaactcaactcaaaac

SEQ ID NO: 8953 - RNA, 22 nt, synthetic construct
  source 1..22: mol_type = other RNA
tcactttttgttgaagtagaat

SEQ ID NO: 8954 - RNA, 22 nt, synthetic construct
  source 1..22: mol_type = other RNA
tcaggttgattttgaattaagt

SEQ ID NO: 8955 - RNA, 22 nt, synthetic construct
  source 1..22: mol_type = other RNA
tcagtctttttatgatctatcg

SEQ ID NO: 8956 - RNA, 22 nt, synthetic construct
  source 1..22: mol_type = other RNA
tcagttccttttcttcttcttt

SEQ ID NO: 8957 - RNA, 22 nt, synthetic construct
  source 1..22: mol_type = other RNA
tcagttgggacatggtcttaaa

SEQ ID NO: 8958 - RNA, 22 nt, synthetic construct
  source 1..22: mol_type = other RNA
tcataaaaagactgatcaaata

SEQ ID NO: 8959 - RNA, 22 nt, synthetic construct
  source 1..22: mol_type = other RNA
tcatcatttgattctctatctc

SEQ ID NO: 8960 - RNA, 22 nt, synthetic construct
  source 1..22: mol_type = other RNA
tcattaatttggcccttcgtct

SEQ ID NO: 8961 - RNA, 22 nt, synthetic construct
  source 1..22: mol_type = other RNA
tcatttgattctctatctccag

SEQ ID NO: 8962 - RNA, 22 nt, synthetic construct
  source 1..22: mol_type = other RNA
tcatttttgacttgtagtttat

SEQ ID NO: 8963 - RNA, 22 nt, synthetic construct
  source 1..22: mol_type = other RNA
tccagaacacccagaagtaact

SEQ ID NO: 8964 - RNA, 22 nt, synthetic construct
  source 1..22: mol_type = other RNA
tccagaattgatcaagacaatt

SEQ ID NO: 8965 - RNA, 22 nt, synthetic construct
  source 1..22: mol_type = other RNA
tccagagccaaaatcaagattt

SEQ ID NO: 8966 - RNA, 22 nt, synthetic construct
  source 1..22: mol_type = other RNA
tccataagacgaagggccaaat

SEQ ID NO: 8967 - RNA, 22 nt, synthetic construct
  source 1..22: mol_type = other RNA
tcccaactgaaggaggccattg

SEQ ID NO: 8968 - RNA, 22 nt, synthetic construct
  source 1..22: mol_type = other RNA
tcctagaagaaaaaattctact

SEQ ID NO: 8969 - RNA, 22 nt, synthetic construct
  source 1..22: mol_type = other RNA
tcctccagaattgatcaagaca

SEQ ID NO: 8970 - RNA, 22 nt, synthetic construct
  source 1..22: mol_type = other RNA
tcctctagttatttcctccaga

SEQ ID NO: 8971 - RNA, 22 nt, synthetic construct
  source 1..22: mol_type = other RNA
tccttcagttgggacatggtct

SEQ ID NO: 8972 - RNA, 22 nt, synthetic construct
  source 1..22: mol_type = other RNA
tccttctttttattgttcctct

SEQ ID NO: 8973 - RNA, 22 nt, synthetic construct
  source 1..22: mol_type = other RNA
tccttttcttcttctttgattt

SEQ ID NO: 8974 - RNA, 22 nt, synthetic construct
  source 1..22: mol_type = other RNA
tcgctgcaaaccagtgaaatca

SEQ ID NO: 8975 - RNA, 22 nt, synthetic construct
  source 1..22: mol_type = other RNA
tcgtctaacatagcaaatcttg

SEQ ID NO: 8976 - RNA, 22 nt, synthetic construct
  source 1..22: mol_type = other RNA
tcgtcttatggacaaagtcttt

SEQ ID NO: 8977 - RNA, 22 nt, synthetic construct
  source 1..22: mol_type = other RNA
tctaacatagcaaatcttgatt

SEQ ID NO: 8978 - RNA, 22 nt, synthetic construct
  source 1..22: mol_type = other RNA
tctacttactttaagtgaagtt

SEQ ID NO: 8979 - RNA, 22 nt, synthetic construct
  source 1..22: mol_type = other RNA
tctacttcaacaaaaagtgaaa

SEQ ID NO: 8980 - RNA, 22 nt, synthetic construct
  source 1..22: mol_type = other RNA
tctaggaggctttcaagttttg

SEQ ID NO: 8981 - RNA, 22 nt, synthetic construct
  source 1..22: mol_type = other RNA
tctagttatttcctccagaatt

SEQ ID NO: 8982 - RNA, 22 nt, synthetic construct
  source 1..22: mol_type = other RNA
tctatcgctgcaaaccagtgaa

SEQ ID NO: 8983 - RNA, 22 nt, synthetic construct
  source 1..22: mol_type = other RNA
tctatctccagagccaaaatca

SEQ ID NO: 8984 - RNA, 22 nt, synthetic construct
  source 1..22: mol_type = other RNA
tctcagttccttttcttcttct

SEQ ID NO: 8985 - RNA, 22 nt, synthetic construct
  source 1..22: mol_type = other RNA
tctccagagccaaaatcaagat

SEQ ID NO: 8986 - RNA, 22 nt, synthetic construct
  source 1..22: mol_type = other RNA
tctctatctccagagccaaaat

SEQ ID NO: 8987 - RNA, 22 nt, synthetic construct
  source 1..22: mol_type = other RNA
tctggagatagagaatcaaatg

SEQ ID NO: 8988 - RNA, 22 nt, synthetic construct
  source 1..22: mol_type = other RNA
tctggaggaaataactagagga

SEQ ID NO: 8989 - RNA, 22 nt, synthetic construct
  source 1..22: mol_type = other RNA
tctggagtttcaggttgatttt

SEQ ID NO: 8990 - RNA, 22 nt, synthetic construct
  source 1..22: mol_type = other RNA
tctgggtgttctggagtttcag

SEQ ID NO: 8991 - RNA, 22 nt, synthetic construct
  source 1..22: mol_type = other RNA
tcttaaagactttgtccataag

SEQ ID NO: 8992 - RNA, 22 nt, synthetic construct
  source 1..22: mol_type = other RNA
tcttatggacaaagtctttaag

SEQ ID NO: 8993 - RNA, 22 nt, synthetic construct
  source 1..22: mol_type = other RNA
tcttcatttttgacttgtagtt

SEQ ID NO: 8994 - RNA, 22 nt, synthetic construct
  source 1..22: mol_type = other RNA
tcttctaggaggctttcaagtt

SEQ ID NO: 8995 - RNA, 22 nt, synthetic construct
  source 1..22: mol_type = other RNA
tcttctcagttccttttcttct

SEQ ID NO: 8996 - RNA, 22 nt, synthetic construct
  source 1..22: mol_type = other RNA
tcttcttctttgatttcactgg

SEQ ID NO: 8997 - RNA, 22 nt, synthetic construct
  source 1..22: mol_type = other RNA
tcttctttgatttcactggttt

SEQ ID NO: 8998 - RNA, 22 nt, synthetic construct
  source 1..22: mol_type = other RNA
tcttgatcaattctggaggaaa

SEQ ID NO: 8999 - RNA, 22 nt, synthetic construct
  source 1..22: mol_type = other RNA
tcttgattttggctctggagat

SEQ ID NO: 9000 - RNA, 22 nt, synthetic construct
  source 1..22: mol_type = other RNA
tctttaagaccatgtcccaact

SEQ ID NO: 9001 - RNA, 22 nt, synthetic construct
  source 1..22: mol_type = other RNA
tctttacctcttcatttttgac

SEQ ID NO: 9002 - RNA, 22 nt, synthetic construct
  source 1..22: mol_type = other RNA
tctttgatttcactggtttgca

SEQ ID NO: 9003 - RNA, 22 nt, synthetic construct
  source 1..22: mol_type = other RNA
tctttttatgatctatcgctgc

SEQ ID NO: 9004 - RNA, 22 nt, synthetic construct
  source 1..22: mol_type = other RNA
tctttttattgttcctctagtt

SEQ ID NO: 9005 - RNA, 22 nt, synthetic construct
  source 1..22: mol_type = other RNA
tgaaactccagaacacccagaa

SEQ ID NO: 9006 - RNA, 22 nt, synthetic construct
  source 1..22: mol_type = other RNA
tgaaagcctcctagaagaaaaa

SEQ ID NO: 9007 - RNA, 22 nt, synthetic construct
  source 1..22: mol_type = other RNA
tgaaatatgtcattaatttggc

SEQ ID NO: 9008 - RNA, 22 nt, synthetic construct
  source 1..22: mol_type = other RNA
tgaaatatttagaagagcaact

SEQ ID NO: 9009 - RNA, 22 nt, synthetic construct
  source 1..22: mol_type = other RNA
tgaaatcaaagaagaagaaaag

SEQ ID NO: 9010 - RNA, 22 nt, synthetic construct
  source 1..22: mol_type = other RNA
tgaaccctctttattttctact

SEQ ID NO: 9011 - RNA, 22 nt, synthetic construct
  source 1..22: mol_type = other RNA
tgaactcaactcaaaacttgaa

SEQ ID NO: 9012 - RNA, 22 nt, synthetic construct
  source 1..22: mol_type = other RNA
tgaagaggtaaagaatatgtca

SEQ ID NO: 9013 - RNA, 22 nt, synthetic construct
  source 1..22: mol_type = other RNA
tgaaggaggccattggctaaaa

SEQ ID NO: 9014 - RNA, 22 nt, synthetic construct
  source 1..22: mol_type = other RNA
tgaagtagaattttttcttcta

SEQ ID NO: 9015 - RNA, 22 nt, synthetic construct
  source 1..22: mol_type = other RNA
tgaagttacttctgggtgttct

SEQ ID NO: 9016 - RNA, 22 nt, synthetic construct
  source 1..22: mol_type = other RNA
tgaattaagttagttagttgct

SEQ ID NO: 9017 - RNA, 22 nt, synthetic construct
  source 1..22: mol_type = other RNA
tgaattgtcttgatcaattctg

SEQ ID NO: 9018 - RNA, 22 nt, synthetic construct
  source 1..22: mol_type = other RNA
tgacatattctttacctcttca

SEQ ID NO: 9019 - RNA, 22 nt, synthetic construct
  source 1..22: mol_type = other RNA
tgacatatttcaaaaactcaac

SEQ ID NO: 9020 - RNA, 22 nt, synthetic construct
  source 1..22: mol_type = other RNA
tgacttgtagtttatatgtagt

SEQ ID NO: 9021 - RNA, 22 nt, synthetic construct
  source 1..22: mol_type = other RNA
tgagaagaactacatataaact

SEQ ID NO: 9022 - RNA, 22 nt, synthetic construct
  source 1..22: mol_type = other RNA
tgagttcaagtgacatattctt

SEQ ID NO: 9023 - RNA, 22 nt, synthetic construct
  source 1..22: mol_type = other RNA
tgagttgagttcaagtgacata

SEQ ID NO: 9024 - RNA, 22 nt, synthetic construct
  source 1..22: mol_type = other RNA
tgagtttttgaaatatgtcatt

SEQ ID NO: 9025 - RNA, 22 nt, synthetic construct
  source 1..22: mol_type = other RNA
tgatcaaatatgttgagttttt

SEQ ID NO: 9026 - RNA, 22 nt, synthetic construct
  source 1..22: mol_type = other RNA
tgatcaagacaattcatcattt

SEQ ID NO: 9027 - RNA, 22 nt, synthetic construct
  source 1..22: mol_type = other RNA
tgatcaattctggaggaaataa

SEQ ID NO: 9028 - RNA, 22 nt, synthetic construct
  source 1..22: mol_type = other RNA
tgatcagtctttttatgatcta

SEQ ID NO: 9029 - RNA, 22 nt, synthetic construct
  source 1..22: mol_type = other RNA
tgatctatcgctgcaaaccagt

SEQ ID NO: 9030 - RNA, 22 nt, synthetic construct
  source 1..22: mol_type = other RNA
tgatgaattgtcttgatcaatt

SEQ ID NO: 9031 - RNA, 22 nt, synthetic construct
  source 1..22: mol_type = other RNA
tgattctctatctccagagcca

SEQ ID NO: 9032 - RNA, 22 nt, synthetic construct
  source 1..22: mol_type = other RNA
tgatttcactggtttgcagcga

SEQ ID NO: 9033 - RNA, 22 nt, synthetic construct
  source 1..22: mol_type = other RNA
tgattttggctctggagataga

SEQ ID NO: 9034 - RNA, 22 nt, synthetic construct
  source 1..22: mol_type = other RNA
tgcaaaccagtgaaatcaaaga

SEQ ID NO: 9035 - RNA, 22 nt, synthetic construct
  source 1..22: mol_type = other RNA
tgcagcgatagatcataaaaag

SEQ ID NO: 9036 - RNA, 22 nt, synthetic construct
  source 1..22: mol_type = other RNA
tgctatgttagacgatgtaaaa

SEQ ID NO: 9037 - RNA, 22 nt, synthetic construct
  source 1..22: mol_type = other RNA
tgctcttctaaatatttcactt

SEQ ID NO: 9038 - RNA, 22 nt, synthetic construct
  source 1..22: mol_type = other RNA
tggacaaagtctttaagaccat

SEQ ID NO: 9039 - RNA, 22 nt, synthetic construct
  source 1..22: mol_type = other RNA
tggagatagagaatcaaatgat

SEQ ID NO: 9040 - RNA, 22 nt, synthetic construct
  source 1..22: mol_type = other RNA
tggaggaaataactagaggaac

SEQ ID NO: 9041 - RNA, 22 nt, synthetic construct
  source 1..22: mol_type = other RNA
tggagtttcaggttgattttga

SEQ ID NO: 9042 - RNA, 22 nt, synthetic construct
  source 1..22: mol_type = other RNA
tggcccttcgtcttatggacaa

SEQ ID NO: 9043 - RNA, 22 nt, synthetic construct
  source 1..22: mol_type = other RNA
tggcctccttcagttgggacat

SEQ ID NO: 9044 - RNA, 22 nt, synthetic construct
  source 1..22: mol_type = other RNA
tggctaaaatttttacatcgtc

SEQ ID NO: 9045 - RNA, 22 nt, synthetic construct
  source 1..22: mol_type = other RNA
tggctctggagatagagaatca

SEQ ID NO: 9046 - RNA, 22 nt, synthetic construct
  source 1..22: mol_type = other RNA
tgggacatggtcttaaagactt

SEQ ID NO: 9047 - RNA, 22 nt, synthetic construct
  source 1..22: mol_type = other RNA
tgggtgttctggagtttcaggt

SEQ ID NO: 9048 - RNA, 22 nt, synthetic construct
  source 1..22: mol_type = other RNA
tggtcttaaagactttgtccat

SEQ ID NO: 9049 - RNA, 22 nt, synthetic construct
  source 1..22: mol_type = other RNA
tggtttgcagcgatagatcata

SEQ ID NO: 9050 - RNA, 22 nt, synthetic construct
  source 1..22: mol_type = other RNA
tgtaaaaattttagccaatggc

SEQ ID NO: 9051 - RNA, 22 nt, synthetic construct
  source 1..22: mol_type = other RNA
tgtagttcttctcagttccttt

SEQ ID NO: 9052 - RNA, 22 nt, synthetic construct
  source 1..22: mol_type = other RNA
tgtagtttatatgtagttcttc

SEQ ID NO: 9053 - RNA, 22 nt, synthetic construct
  source 1..22: mol_type = other RNA
tgtcacttgaactcaactcaaa

SEQ ID NO: 9054 - RNA, 22 nt, synthetic construct
  source 1..22: mol_type = other RNA
tgtcattaatttggcccttcgt

SEQ ID NO: 9055 - RNA, 22 nt, synthetic construct
  source 1..22: mol_type = other RNA
tgtccataagacgaagggccaa

SEQ ID NO: 9056 - RNA, 22 nt, synthetic construct
  source 1..22: mol_type = other RNA
tgtcccaactgaaggaggccat

SEQ ID NO: 9057 - RNA, 22 nt, synthetic construct
  source 1..22: mol_type = other RNA
tgtcttgatcaattctggagga

SEQ ID NO: 9058 - RNA, 22 nt, synthetic construct
  source 1..22: mol_type = other RNA
tgttagacgatgtaaaaatttt

SEQ ID NO: 9059 - RNA, 22 nt, synthetic construct
  source 1..22: mol_type = other RNA
tgttcacaattaagctccttct

SEQ ID NO: 9060 - RNA, 22 nt, synthetic construct
  source 1..22: mol_type = other RNA
tgttcctctagttatttcctcc

SEQ ID NO: 9061 - RNA, 22 nt, synthetic construct
  source 1..22: mol_type = other RNA
tgttctggagtttcaggttgat

SEQ ID NO: 9062 - RNA, 22 nt, synthetic construct
  source 1..22: mol_type = other RNA
tgttgaagtagaattttttctt

SEQ ID NO: 9063 - RNA, 22 nt, synthetic construct
  source 1..22: mol_type = other RNA
tgttgagtttttgaaatatgtc

SEQ ID NO: 9064 - RNA, 22 nt, synthetic construct
  source 1..22: mol_type = other RNA
ttaaagactttgtccataagac

SEQ ID NO: 9065 - RNA, 22 nt, synthetic construct
  source 1..22: mol_type = other RNA
ttaagaccatgtcccaactgaa

SEQ ID NO: 9066 - RNA, 22 nt, synthetic construct
  source 1..22: mol_type = other RNA
ttaagctccttctttttattgt

SEQ ID NO: 9067 - RNA, 22 nt, synthetic construct
  source 1..22: mol_type = other RNA
ttaagtgaagttacttctgggt

SEQ ID NO: 9068 - RNA, 22 nt, synthetic construct
  source 1..22: mol_type = other RNA
ttaagttagttagttgctcttc

SEQ ID NO: 9069 - RNA, 22 nt, synthetic construct
  source 1..22: mol_type = other RNA
ttaattcaaaatcaacctgaaa

SEQ ID NO: 9070 - RNA, 22 nt, synthetic construct
  source 1..22: mol_type = other RNA
ttaatttggcccttcgtcttat

SEQ ID NO: 9071 - RNA, 22 nt, synthetic construct
  source 1..22: mol_type = other RNA
ttacatcgtctaacatagcaaa

SEQ ID NO: 9072 - RNA, 22 nt, synthetic construct
  source 1..22: mol_type = other RNA
ttacctcttcatttttgacttg

SEQ ID NO: 9073 - RNA, 22 nt, synthetic construct
  source 1..22: mol_type = other RNA
ttacttctgggtgttctggagt

SEQ ID NO: 9074 - RNA, 22 nt, synthetic construct
  source 1..22: mol_type = other RNA
ttactttaagtgaagttacttc

SEQ ID NO: 9075 - RNA, 22 nt, synthetic construct
  source 1..22: mol_type = other RNA
ttagaagagcaactaactaact

SEQ ID NO: 9076 - RNA, 22 nt, synthetic construct
  source 1..22: mol_type = other RNA
ttagacgatgtaaaaattttag

SEQ ID NO: 9077 - RNA, 22 nt, synthetic construct
  source 1..22: mol_type = other RNA
ttagccaatggcctccttcagt

SEQ ID NO: 9078 - RNA, 22 nt, synthetic construct
  source 1..22: mol_type = other RNA
ttagttagttgctcttctaaat

SEQ ID NO: 9079 - RNA, 22 nt, synthetic construct
  source 1..22: mol_type = other RNA
ttagttgctcttctaaatattt

SEQ ID NO: 9080 - RNA, 22 nt, synthetic construct
  source 1..22: mol_type = other RNA
ttatatgtagttcttctcagtt

SEQ ID NO: 9081 - RNA, 22 nt, synthetic construct
  source 1..22: mol_type = other RNA
ttatgatctatcgctgcaaacc

SEQ ID NO: 9082 - RNA, 22 nt, synthetic construct
  source 1..22: mol_type = other RNA
ttatggacaaagtctttaagac

SEQ ID NO: 9083 - RNA, 22 nt, synthetic construct
  source 1..22: mol_type = other RNA
ttattgttcctctagttatttc

SEQ ID NO: 9084 - RNA, 22 nt, synthetic construct
  source 1..22: mol_type = other RNA
ttatttcctccagaattgatca

SEQ ID NO: 9085 - RNA, 22 nt, synthetic construct
  source 1..22: mol_type = other RNA
ttcaaaaactcaacatatttga

SEQ ID NO: 9086 - RNA, 22 nt, synthetic construct
  source 1..22: mol_type = other RNA
ttcaaaatcaacctgaaactcc

SEQ ID NO: 9087 - RNA, 22 nt, synthetic construct
  source 1..22: mol_type = other RNA
ttcaagtgacatattctttacc

SEQ ID NO: 9088 - RNA, 22 nt, synthetic construct
  source 1..22: mol_type = other RNA
ttcaagttttgagttgagttca

SEQ ID NO: 9089 - RNA, 22 nt, synthetic construct
  source 1..22: mol_type = other RNA
ttcacaattaagctccttcttt

SEQ ID NO: 9090 - RNA, 22 nt, synthetic construct
  source 1..22: mol_type = other RNA
ttcactggtttgcagcgataga

SEQ ID NO: 9091 - RNA, 22 nt, synthetic construct
  source 1..22: mol_type = other RNA
ttcacttaaagtaagtagaaaa

SEQ ID NO: 9092 - RNA, 22 nt, synthetic construct
  source 1..22: mol_type = other RNA
ttcactttttgttgaagtagaa

SEQ ID NO: 9093 - RNA, 22 nt, synthetic construct
  source 1..22: mol_type = other RNA
ttcaggttgattttgaattaag

SEQ ID NO: 9094 - RNA, 22 nt, synthetic construct
  source 1..22: mol_type = other RNA
ttcagttgggacatggtcttaa

SEQ ID NO: 9095 - RNA, 22 nt, synthetic construct
  source 1..22: mol_type = other RNA
ttcatcatttgattctctatct

SEQ ID NO: 9096 - RNA, 22 nt, synthetic construct
  source 1..22: mol_type = other RNA
ttcatttttgacttgtagttta

SEQ ID NO: 9097 - RNA, 22 nt, synthetic construct
  source 1..22: mol_type = other RNA
ttcctccagaattgatcaagac

SEQ ID NO: 9098 - RNA, 22 nt, synthetic construct
  source 1..22: mol_type = other RNA
ttcctctagttatttcctccag

SEQ ID NO: 9099 - RNA, 22 nt, synthetic construct
  source 1..22: mol_type = other RNA
ttccttttcttcttctttgatt

SEQ ID NO: 9100 - RNA, 22 nt, synthetic construct
  source 1..22: mol_type = other RNA
ttcgtcttatggacaaagtctt

SEQ ID NO: 9101 - RNA, 22 nt, synthetic construct
  source 1..22: mol_type = other RNA
ttctacttactttaagtgaagt

SEQ ID NO: 9102 - RNA, 22 nt, synthetic construct
  source 1..22: mol_type = other RNA
ttctacttcaacaaaaagtgaa

SEQ ID NO: 9103 - RNA, 22 nt, synthetic construct
  source 1..22: mol_type = other RNA
ttctaggaggctttcaagtttt

SEQ ID NO: 9104 - RNA, 22 nt, synthetic construct
  source 1..22: mol_type = other RNA
ttctcagttccttttcttcttc

SEQ ID NO: 9105 - RNA, 22 nt, synthetic construct
  source 1..22: mol_type = other RNA
ttctctatctccagagccaaaa

SEQ ID NO: 9106 - RNA, 22 nt, synthetic construct
  source 1..22: mol_type = other RNA
ttctggaggaaataactagagg

SEQ ID NO: 9107 - RNA, 22 nt, synthetic construct
  source 1..22: mol_type = other RNA
ttctggagtttcaggttgattt

SEQ ID NO: 9108 - RNA, 22 nt, synthetic construct
  source 1..22: mol_type = other RNA
ttctgggtgttctggagtttca

SEQ ID NO: 9109 - RNA, 22 nt, synthetic construct
  source 1..22: mol_type = other RNA
ttcttctaggaggctttcaagt

SEQ ID NO: 9110 - RNA, 22 nt, synthetic construct
  source 1..22: mol_type = other RNA
ttcttctcagttccttttcttc

SEQ ID NO: 9111 - RNA, 22 nt, synthetic construct
  source 1..22: mol_type = other RNA
ttcttcttctttgatttcactg

SEQ ID NO: 9112 - RNA, 22 nt, synthetic construct
  source 1..22: mol_type = other RNA
ttcttctttgatttcactggtt

SEQ ID NO: 9113 - RNA, 22 nt, synthetic construct
  source 1..22: mol_type = other RNA
ttctttacctcttcatttttga

SEQ ID NO: 9114 - RNA, 22 nt, synthetic construct
  source 1..22: mol_type = other RNA
ttctttgatttcactggtttgc

SEQ ID NO: 9115 - RNA, 22 nt, synthetic construct
  source 1..22: mol_type = other RNA
ttctttttattgttcctctagt

SEQ ID NO: 9116 - RNA, 22 nt, synthetic construct
  source 1..22: mol_type = other RNA
ttgaaagcctcctagaagaaaa

SEQ ID NO: 9117 - RNA, 22 nt, synthetic construct
  source 1..22: mol_type = other RNA
ttgaaatatgtcattaatttgg

SEQ ID NO: 9118 - RNA, 22 nt, synthetic construct
  source 1..22: mol_type = other RNA
ttgaactcaactcaaaacttga

SEQ ID NO: 9119 - RNA, 22 nt, synthetic construct
  source 1..22: mol_type = other RNA
ttgaagtagaattttttcttct

SEQ ID NO: 9120 - RNA, 22 nt, synthetic construct
  source 1..22: mol_type = other RNA
ttgaattaagttagttagttgc

SEQ ID NO: 9121 - RNA, 22 nt, synthetic construct
  source 1..22: mol_type = other RNA
ttgacttgtagtttatatgtag

SEQ ID NO: 9122 - RNA, 22 nt, synthetic construct
  source 1..22: mol_type = other RNA
ttgagttcaagtgacatattct

SEQ ID NO: 9123 - RNA, 22 nt, synthetic construct
  source 1..22: mol_type = other RNA
ttgagttgagttcaagtgacat

SEQ ID NO: 9124 - RNA, 22 nt, synthetic construct
  source 1..22: mol_type = other RNA
ttgagtttttgaaatatgtcat

SEQ ID NO: 9125 - RNA, 22 nt, synthetic construct
  source 1..22: mol_type = other RNA
ttgatcaagacaattcatcatt

SEQ ID NO: 9126 - RNA, 22 nt, synthetic construct
  source 1..22: mol_type = other RNA
ttgatcaattctggaggaaata

SEQ ID NO: 9127 - RNA, 22 nt, synthetic construct
  source 1..22: mol_type = other RNA
ttgatcagtctttttatgatct

SEQ ID NO: 9128 - RNA, 22 nt, synthetic construct
  source 1..22: mol_type = other RNA
ttgattctctatctccagagcc

SEQ ID NO: 9129 - RNA, 22 nt, synthetic construct
  source 1..22: mol_type = other RNA
ttgatttcactggtttgcagcg

SEQ ID NO: 9130 - RNA, 22 nt, synthetic construct
  source 1..22: mol_type = other RNA
ttgattttggctctggagatag

SEQ ID NO: 9131 - RNA, 22 nt, synthetic construct
  source 1..22: mol_type = other RNA
ttgcagcgatagatcataaaaa

SEQ ID NO: 9132 - RNA, 22 nt, synthetic construct
  source 1..22: mol_type = other RNA
ttgctatgttagacgatgtaaa

SEQ ID NO: 9133 - RNA, 22 nt, synthetic construct
  source 1..22: mol_type = other RNA
ttgctcttctaaatatttcact

SEQ ID NO: 9134 - RNA, 22 nt, synthetic construct
  source 1..22: mol_type = other RNA
ttggcccttcgtcttatggaca

SEQ ID NO: 9135 - RNA, 22 nt, synthetic construct
  source 1..22: mol_type = other RNA
ttggctaaaatttttacatcgt

SEQ ID NO: 9136 - RNA, 22 nt, synthetic construct
  source 1..22: mol_type = other RNA
ttggctctggagatagagaatc

SEQ ID NO: 9137 - RNA, 22 nt, synthetic construct
  source 1..22: mol_type = other RNA
ttgggacatggtcttaaagact

SEQ ID NO: 9138 - RNA, 22 nt, synthetic construct
  source 1..22: mol_type = other RNA
ttgtagtttatatgtagttctt

SEQ ID NO: 9139 - RNA, 22 nt, synthetic construct
  source 1..22: mol_type = other RNA
ttgtccataagacgaagggcca

SEQ ID NO: 9140 - RNA, 22 nt, synthetic construct
  source 1..22: mol_type = other RNA
ttgtcttgatcaattctggagg

SEQ ID NO: 9141 - RNA, 22 nt, synthetic construct
  source 1..22: mol_type = other RNA
ttgttcctctagttatttcctc

SEQ ID NO: 9142 - RNA, 22 nt, synthetic construct
  source 1..22: mol_type = other RNA
ttgttgaagtagaattttttct

SEQ ID NO: 9143 - RNA, 22 nt, synthetic construct
  source 1..22: mol_type = other RNA
tttaagaccatgtcccaactga

SEQ ID NO: 9144 - RNA, 22 nt, synthetic construct
  source 1..22: mol_type = other RNA
tttaagtgaagttacttctggg

SEQ ID NO: 9145 - RNA, 22 nt, synthetic construct
  source 1..22: mol_type = other RNA
tttacatcgtctaacatagcaa

SEQ ID NO: 9146 - RNA, 22 nt, synthetic construct
  source 1..22: mol_type = other RNA
tttacctcttcatttttgactt

SEQ ID NO: 9147 - RNA, 22 nt, synthetic construct
  source 1..22: mol_type = other RNA
tttagaagagcaactaactaac

SEQ ID NO: 9148 - RNA, 22 nt, synthetic construct
  source 1..22: mol_type = other RNA
tttagccaatggcctccttcag

SEQ ID NO: 9149 - RNA, 22 nt, synthetic construct
  source 1..22: mol_type = other RNA
tttatatgtagttcttctcagt

SEQ ID NO: 9150 - RNA, 22 nt, synthetic construct
  source 1..22: mol_type = other RNA
tttatgatctatcgctgcaaac

SEQ ID NO: 9151 - RNA, 22 nt, synthetic construct
  source 1..22: mol_type = other RNA
tttattgttcctctagttattt

SEQ ID NO: 9152 - RNA, 22 nt, synthetic construct
  source 1..22: mol_type = other RNA
tttcaaaaactcaacatatttg

SEQ ID NO: 9153 - RNA, 22 nt, synthetic construct
  source 1..22: mol_type = other RNA
tttcaagttttgagttgagttc

SEQ ID NO: 9154 - RNA, 22 nt, synthetic construct
  source 1..22: mol_type = other RNA
tttcactggtttgcagcgatag

SEQ ID NO: 9155 - RNA, 22 nt, synthetic construct
  source 1..22: mol_type = other RNA
tttcactttttgttgaagtaga

SEQ ID NO: 9156 - RNA, 22 nt, synthetic construct
  source 1..22: mol_type = other RNA
tttcaggttgattttgaattaa

SEQ ID NO: 9157 - RNA, 22 nt, synthetic construct
  source 1..22: mol_type = other RNA
tttcctccagaattgatcaaga

SEQ ID NO: 9158 - RNA, 22 nt, synthetic construct
  source 1..22: mol_type = other RNA
tttctacttactttaagtgaag

SEQ ID NO: 9159 - RNA, 22 nt, synthetic construct
  source 1..22: mol_type = other RNA
tttcttctaggaggctttcaag

SEQ ID NO: 9160 - RNA, 22 nt, synthetic construct
  source 1..22: mol_type = other RNA
tttcttcttctttgatttcact

SEQ ID NO: 9161 - RNA, 22 nt, synthetic construct
  source 1..22: mol_type = other RNA
tttgaattaagttagttagttg

SEQ ID NO: 9162 - RNA, 22 nt, synthetic construct
  source 1..22: mol_type = other RNA
tttgacttgtagtttatatgta

SEQ ID NO: 9163 - RNA, 22 nt, synthetic construct
  source 1..22: mol_type = other RNA
tttgagttgagttcaagtgaca

SEQ ID NO: 9164 - RNA, 22 nt, synthetic construct
  source 1..22: mol_type = other RNA
tttgatcagtctttttatgatc

SEQ ID NO: 9165 - RNA, 22 nt, synthetic construct
  source 1..22: mol_type = other RNA
tttgattctctatctccagagc

SEQ ID NO: 9166 - RNA, 22 nt, synthetic construct
  source 1..22: mol_type = other RNA
tttgatttcactggtttgcagc

SEQ ID NO: 9167 - RNA, 22 nt, synthetic construct
  source 1..22: mol_type = other RNA
tttgcagcgatagatcataaaa

SEQ ID NO: 9168 - RNA, 22 nt, synthetic construct
  source 1..22: mol_type = other RNA
tttgctatgttagacgatgtaa

SEQ ID NO: 9169 - RNA, 22 nt, synthetic construct
  source 1..22: mol_type = other RNA
tttggcccttcgtcttatggac

SEQ ID NO: 9170 - RNA, 22 nt, synthetic construct
  source 1..22: mol_type = other RNA
tttggctctggagatagagaat

SEQ ID NO: 9171 - RNA, 22 nt, synthetic construct
  source 1..22: mol_type = other RNA
tttgtccataagacgaagggcc

SEQ ID NO: 9172 - RNA, 22 nt, synthetic construct
  source 1..22: mol_type = other RNA
tttgttgaagtagaattttttc

SEQ ID NO: 9173 - RNA, 22 nt, synthetic construct
  source 1..22: mol_type = other RNA
ttttacatcgtctaacatagca

SEQ ID NO: 9174 - RNA, 22 nt, synthetic construct
  source 1..22: mol_type = other RNA
ttttagccaatggcctccttca

SEQ ID NO: 9175 - RNA, 22 nt, synthetic construct
  source 1..22: mol_type = other RNA
ttttatgatctatcgctgcaaa

SEQ ID NO: 9176 - RNA, 22 nt, synthetic construct
  source 1..22: mol_type = other RNA
ttttattgttcctctagttatt

SEQ ID NO: 9177 - RNA, 22 nt, synthetic construct
  source 1..22: mol_type = other RNA
ttttctacttactttaagtgaa

SEQ ID NO: 9178 - RNA, 22 nt, synthetic construct
  source 1..22: mol_type = other RNA
ttttcttctaggaggctttcaa

SEQ ID NO: 9179 - RNA, 22 nt, synthetic construct
  source 1..22: mol_type = other RNA
ttttcttcttctttgatttcac

SEQ ID NO: 9180 - RNA, 22 nt, synthetic construct
  source 1..22: mol_type = other RNA
ttttgacttgtagtttatatgt

SEQ ID NO: 9181 - RNA, 22 nt, synthetic construct
  source 1..22: mol_type = other RNA
ttttgagttgagttcaagtgac

SEQ ID NO: 9182 - RNA, 22 nt, synthetic construct
  source 1..22: mol_type = other RNA
ttttggctctggagatagagaa

SEQ ID NO: 9183 - RNA, 22 nt, synthetic construct
  source 1..22: mol_type = other RNA
tttttacatcgtctaacatagc

SEQ ID NO: 9184 - RNA, 22 nt, synthetic construct
  source 1..22: mol_type = other RNA
tttttatgatctatcgctgcaa

SEQ ID NO: 9185 - RNA, 22 nt, synthetic construct
  source 1..22: mol_type = other RNA
tttttattgttcctctagttat

SEQ ID NO: 9186 - RNA, 22 nt, synthetic construct
  source 1..22: mol_type = other RNA
tttttcttctaggaggctttca

SEQ ID NO: 9187 - RNA, 22 nt, synthetic construct
  source 1..22: mol_type = other RNA
tttttgacttgtagtttatatg

SEQ ID NO: 9188 - RNA, 22 nt, synthetic construct
  source 1..22: mol_type = other RNA
ttttttcttctaggaggctttc

SEQ ID NO: 9189 - RNA, 20 nt, synthetic construct
  source 1..20: mol_type = other RNA
aaaaacaagataatagcatc

SEQ ID NO: 9190 - RNA, 20 nt, synthetic construct
  source 1..20: mol_type = other RNA
aaaacaagataatagcatca

SEQ ID NO: 9191 - RNA, 20 nt, synthetic construct
  source 1..20: mol_type = other RNA
aaaagaaatagaaaatcagg

SEQ ID NO: 9192 - RNA, 20 nt, synthetic construct
  source 1..20: mol_type = other RNA
aaaagtctggatatagagag

SEQ ID NO: 9193 - RNA, 20 nt, synthetic construct
  source 1..20: mol_type = other RNA
aaaatactgacttacctgat

SEQ ID NO: 9194 - RNA, 20 nt, synthetic construct
  source 1..20: mol_type = other RNA
aaaatcaggtaagtcagtat

SEQ ID NO: 9195 - RNA, 20 nt, synthetic construct
  source 1..20: mol_type = other RNA
aaacaagataatagcatcaa

SEQ ID NO: 9196 - RNA, 20 nt, synthetic construct
  source 1..20: mol_type = other RNA
aaacaattaaaccaacagca

SEQ ID NO: 9197 - RNA, 20 nt, synthetic construct
  source 1..20: mol_type = other RNA
aaaccaacagcatagtcaaa

SEQ ID NO: 9198 - RNA, 20 nt, synthetic construct
  source 1..20: mol_type = other RNA
aaagaaatagaaaatcaggt

SEQ ID NO: 9199 - RNA, 20 nt, synthetic construct
  source 1..20: mol_type = other RNA
aaagaccttctccagaccgt

SEQ ID NO: 9200 - RNA, 20 nt, synthetic construct
  source 1..20: mol_type = other RNA
aaagtctggatatagagagt

SEQ ID NO: 9201 - RNA, 20 nt, synthetic construct
  source 1..20: mol_type = other RNA
aaatactgacttacctgatt

SEQ ID NO: 9202 - RNA, 20 nt, synthetic construct
  source 1..20: mol_type = other RNA
aaatagaaaatcaggtaagt

SEQ ID NO: 9203 - RNA, 20 nt, synthetic construct
  source 1..20: mol_type = other RNA
aaatcaggtaagtcagtatt

SEQ ID NO: 9204 - RNA, 20 nt, synthetic construct
  source 1..20: mol_type = other RNA
aacaagataatagcatcaaa

SEQ ID NO: 9205 - RNA, 20 nt, synthetic construct
  source 1..20: mol_type = other RNA
aacaattaaaccaacagcat

SEQ ID NO: 9206 - RNA, 20 nt, synthetic construct
  source 1..20: mol_type = other RNA
aacagcatagtcaaataaaa

SEQ ID NO: 9207 - RNA, 20 nt, synthetic construct
  source 1..20: mol_type = other RNA
aaccaacagcatagtcaaat

SEQ ID NO: 9208 - RNA, 20 nt, synthetic construct
  source 1..20: mol_type = other RNA
aaccaacctactctctatat

SEQ ID NO: 9209 - RNA, 20 nt, synthetic construct
  source 1..20: mol_type = other RNA
aacctactctctatatccag

SEQ ID NO: 9210 - RNA, 20 nt, synthetic construct
  source 1..20: mol_type = other RNA
aacttataaccaacctactc

SEQ ID NO: 9211 - RNA, 20 nt, synthetic construct
  source 1..20: mol_type = other RNA
aagaaatagaaaatcaggta

SEQ ID NO: 9212 - RNA, 20 nt, synthetic construct
  source 1..20: mol_type = other RNA
aagaccaatataaacaatta

SEQ ID NO: 9213 - RNA, 20 nt, synthetic construct
  source 1..20: mol_type = other RNA
aagaccttctccagaccgtg

SEQ ID NO: 9214 - RNA, 20 nt, synthetic construct
  source 1..20: mol_type = other RNA
aagataatagcatcaaagac

SEQ ID NO: 9215 - RNA, 20 nt, synthetic construct
  source 1..20: mol_type = other RNA
aaggtctttgatgctattat

SEQ ID NO: 9216 - RNA, 20 nt, synthetic construct
  source 1..20: mol_type = other RNA
aagtcagtattttaatggta

SEQ ID NO: 9217 - RNA, 20 nt, synthetic construct
  source 1..20: mol_type = other RNA
aagtctggatatagagagta

SEQ ID NO: 9218 - RNA, 20 nt, synthetic construct
  source 1..20: mol_type = other RNA
aatactgacttacctgattt

SEQ ID NO: 9219 - RNA, 20 nt, synthetic construct
  source 1..20: mol_type = other RNA
aatagaaaatcaggtaagtc

SEQ ID NO: 9220 - RNA, 20 nt, synthetic construct
  source 1..20: mol_type = other RNA
aatagcatcaaagaccttct

SEQ ID NO: 9221 - RNA, 20 nt, synthetic construct
  source 1..20: mol_type = other RNA
aatcaggtaagtcagtattt

SEQ ID NO: 9222 - RNA, 20 nt, synthetic construct
  source 1..20: mol_type = other RNA
aattaaaccaacagcatagt

SEQ ID NO: 9223 - RNA, 20 nt, synthetic construct
  source 1..20: mol_type = other RNA
aattgtttatattggtcttc

SEQ ID NO: 9224 - RNA, 20 nt, synthetic construct
  source 1..20: mol_type = other RNA
acaaaagtctggatatagag

SEQ ID NO: 9225 - RNA, 20 nt, synthetic construct
  source 1..20: mol_type = other RNA
acaagataatagcatcaaag

SEQ ID NO: 9226 - RNA, 20 nt, synthetic construct
  source 1..20: mol_type = other RNA
acaattaaaccaacagcata

SEQ ID NO: 9227 - RNA, 20 nt, synthetic construct
  source 1..20: mol_type = other RNA
acagcatagtcaaataaaag

SEQ ID NO: 9228 - RNA, 20 nt, synthetic construct
  source 1..20: mol_type = other RNA
acataccattaaaatactga

SEQ ID NO: 9229 - RNA, 20 nt, synthetic construct
  source 1..20: mol_type = other RNA
accaacagcatagtcaaata

SEQ ID NO: 9230 - RNA, 20 nt, synthetic construct
  source 1..20: mol_type = other RNA
accaacctactctctatatc

SEQ ID NO: 9231 - RNA, 20 nt, synthetic construct
  source 1..20: mol_type = other RNA
accaatataaacaattaaac

SEQ ID NO: 9232 - RNA, 20 nt, synthetic construct
  source 1..20: mol_type = other RNA
accattaaaatactgactta

SEQ ID NO: 9233 - RNA, 20 nt, synthetic construct
  source 1..20: mol_type = other RNA
accgtggaagaccaatataa

SEQ ID NO: 9234 - RNA, 20 nt, synthetic construct
  source 1..20: mol_type = other RNA
acctactctctatatccaga

SEQ ID NO: 9235 - RNA, 20 nt, synthetic construct
  source 1..20: mol_type = other RNA
acctgattttctatttcttt

SEQ ID NO: 9236 - RNA, 20 nt, synthetic construct
  source 1..20: mol_type = other RNA
accttctccagaccgtggaa

SEQ ID NO: 9237 - RNA, 20 nt, synthetic construct
  source 1..20: mol_type = other RNA
acggtctggagaaggtcttt

SEQ ID NO: 9238 - RNA, 20 nt, synthetic construct
  source 1..20: mol_type = other RNA
actatgctgttggtttaatt

SEQ ID NO: 9239 - RNA, 20 nt, synthetic construct
  source 1..20: mol_type = other RNA
actctctatatccagacttt

SEQ ID NO: 9240 - RNA, 20 nt, synthetic construct
  source 1..20: mol_type = other RNA
actgacttacctgattttct

SEQ ID NO: 9241 - RNA, 20 nt, synthetic construct
  source 1..20: mol_type = other RNA
acttacctgattttctattt

SEQ ID NO: 9242 - RNA, 20 nt, synthetic construct
  source 1..20: mol_type = other RNA
acttataaccaacctactct

SEQ ID NO: 9243 - RNA, 20 nt, synthetic construct
  source 1..20: mol_type = other RNA
acttttgtagaaaaacaaga

SEQ ID NO: 9244 - RNA, 20 nt, synthetic construct
  source 1..20: mol_type = other RNA
agaaaaacaagataatagca

SEQ ID NO: 9245 - RNA, 20 nt, synthetic construct
  source 1..20: mol_type = other RNA
agaaaatcaggtaagtcagt

SEQ ID NO: 9246 - RNA, 20 nt, synthetic construct
  source 1..20: mol_type = other RNA
agaaatagaaaatcaggtaa

SEQ ID NO: 9247 - RNA, 20 nt, synthetic construct
  source 1..20: mol_type = other RNA
agaaggtctttgatgctatt

SEQ ID NO: 9248 - RNA, 20 nt, synthetic construct
  source 1..20: mol_type = other RNA
agaccaatataaacaattaa

SEQ ID NO: 9249 - RNA, 20 nt, synthetic construct
  source 1..20: mol_type = other RNA
agaccgtggaagaccaatat

SEQ ID NO: 9250 - RNA, 20 nt, synthetic construct
  source 1..20: mol_type = other RNA
agaccttctccagaccgtgg

SEQ ID NO: 9251 - RNA, 20 nt, synthetic construct
  source 1..20: mol_type = other RNA
agacttttgtagaaaaacaa

SEQ ID NO: 9252 - RNA, 20 nt, synthetic construct
  source 1..20: mol_type = other RNA
agataatagcatcaaagacc

SEQ ID NO: 9253 - RNA, 20 nt, synthetic construct
  source 1..20: mol_type = other RNA
agcatagtcaaataaaagaa

SEQ ID NO: 9254 - RNA, 20 nt, synthetic construct
  source 1..20: mol_type = other RNA
agcatcaaagaccttctcca

SEQ ID NO: 9255 - RNA, 20 nt, synthetic construct
  source 1..20: mol_type = other RNA
aggtaagtcagtattttaat

SEQ ID NO: 9256 - RNA, 20 nt, synthetic construct
  source 1..20: mol_type = other RNA
aggtctttgatgctattatc

SEQ ID NO: 9257 - RNA, 20 nt, synthetic construct
  source 1..20: mol_type = other RNA
agtcaaataaaagaaataga

SEQ ID NO: 9258 - RNA, 20 nt, synthetic construct
  source 1..20: mol_type = other RNA
agtctggatatagagagtag

SEQ ID NO: 9259 - RNA, 20 nt, synthetic construct
  source 1..20: mol_type = other RNA
ataaacaattaaaccaacag

SEQ ID NO: 9260 - RNA, 20 nt, synthetic construct
  source 1..20: mol_type = other RNA
ataaccaacctactctctat

SEQ ID NO: 9261 - RNA, 20 nt, synthetic construct
  source 1..20: mol_type = other RNA
ataatagcatcaaagacctt

SEQ ID NO: 9262 - RNA, 20 nt, synthetic construct
  source 1..20: mol_type = other RNA
ataccattaaaatactgact

SEQ ID NO: 9263 - RNA, 20 nt, synthetic construct
  source 1..20: mol_type = other RNA
atactgacttacctgatttt

SEQ ID NO: 9264 - RNA, 20 nt, synthetic construct
  source 1..20: mol_type = other RNA
atagaaaatcaggtaagtca

SEQ ID NO: 9265 - RNA, 20 nt, synthetic construct
  source 1..20: mol_type = other RNA
atagcatcaaagaccttctc

SEQ ID NO: 9266 - RNA, 20 nt, synthetic construct
  source 1..20: mol_type = other RNA
atataaacaattaaaccaac

SEQ ID NO: 9267 - RNA, 20 nt, synthetic construct
  source 1..20: mol_type = other RNA
atatccagacttttgtagaa

SEQ ID NO: 9268 - RNA, 20 nt, synthetic construct
  source 1..20: mol_type = other RNA
atattggtcttccacggtct

SEQ ID NO: 9269 - RNA, 20 nt, synthetic construct
  source 1..20: mol_type = other RNA
atcaaagaccttctccagac

SEQ ID NO: 9270 - RNA, 20 nt, synthetic construct
  source 1..20: mol_type = other RNA
atcaggtaagtcagtatttt

SEQ ID NO: 9271 - RNA, 20 nt, synthetic construct
  source 1..20: mol_type = other RNA
atccagacttttgtagaaaa

SEQ ID NO: 9272 - RNA, 20 nt, synthetic construct
  source 1..20: mol_type = other RNA
atcttgtttttctacaaaag

SEQ ID NO: 9273 - RNA, 20 nt, synthetic construct
  source 1..20: mol_type = other RNA
atgctattatcttgtttttc

SEQ ID NO: 9274 - RNA, 20 nt, synthetic construct
  source 1..20: mol_type = other RNA
atgctgttggtttaattgtt

SEQ ID NO: 9275 - RNA, 20 nt, synthetic construct
  source 1..20: mol_type = other RNA
atgggacataccattaaaat

SEQ ID NO: 9276 - RNA, 20 nt, synthetic construct
  source 1..20: mol_type = other RNA
attaaaatactgacttacct

SEQ ID NO: 9277 - RNA, 20 nt, synthetic construct
  source 1..20: mol_type = other RNA
attaaaccaacagcatagtc

SEQ ID NO: 9278 - RNA, 20 nt, synthetic construct
  source 1..20: mol_type = other RNA
attatcttgtttttctacaa

SEQ ID NO: 9279 - RNA, 20 nt, synthetic construct
  source 1..20: mol_type = other RNA
attggtcttccacggtctgg

SEQ ID NO: 9280 - RNA, 20 nt, synthetic construct
  source 1..20: mol_type = other RNA
attgtttatattggtcttcc

SEQ ID NO: 9281 - RNA, 20 nt, synthetic construct
  source 1..20: mol_type = other RNA
atttcttttatttgactatg

SEQ ID NO: 9282 - RNA, 20 nt, synthetic construct
  source 1..20: mol_type = other RNA
atttgactatgctgttggtt

SEQ ID NO: 9283 - RNA, 20 nt, synthetic construct
  source 1..20: mol_type = other RNA
caaaagtctggatatagaga

SEQ ID NO: 9284 - RNA, 20 nt, synthetic construct
  source 1..20: mol_type = other RNA
caaagaccttctccagaccg

SEQ ID NO: 9285 - RNA, 20 nt, synthetic construct
  source 1..20: mol_type = other RNA
caacagcatagtcaaataaa

SEQ ID NO: 9286 - RNA, 20 nt, synthetic construct
  source 1..20: mol_type = other RNA
caacctactctctatatcca

SEQ ID NO: 9287 - RNA, 20 nt, synthetic construct
  source 1..20: mol_type = other RNA
caagataatagcatcaaaga

SEQ ID NO: 9288 - RNA, 20 nt, synthetic construct
  source 1..20: mol_type = other RNA
caatataaacaattaaacca

SEQ ID NO: 9289 - RNA, 20 nt, synthetic construct
  source 1..20: mol_type = other RNA
caattaaaccaacagcatag

SEQ ID NO: 9290 - RNA, 20 nt, synthetic construct
  source 1..20: mol_type = other RNA
cacggtctggagaaggtctt

SEQ ID NO: 9291 - RNA, 20 nt, synthetic construct
  source 1..20: mol_type = other RNA
cagaccgtggaagaccaata

SEQ ID NO: 9292 - RNA, 20 nt, synthetic construct
  source 1..20: mol_type = other RNA
cagacttttgtagaaaaaca

SEQ ID NO: 9293 - RNA, 20 nt, synthetic construct
  source 1..20: mol_type = other RNA
cagcatagtcaaataaaaga

SEQ ID NO: 9294 - RNA, 20 nt, synthetic construct
  source 1..20: mol_type = other RNA
caggtaagtcagtattttaa

SEQ ID NO: 9295 - RNA, 20 nt, synthetic construct
  source 1..20: mol_type = other RNA
cataccattaaaatactgac

SEQ ID NO: 9296 - RNA, 20 nt, synthetic construct
  source 1..20: mol_type = other RNA
catagtcaaataaaagaaat

SEQ ID NO: 9297 - RNA, 20 nt, synthetic construct
  source 1..20: mol_type = other RNA
catcaaagaccttctccaga

SEQ ID NO: 9298 - RNA, 20 nt, synthetic construct
  source 1..20: mol_type = other RNA
cattaaaatactgacttacc

SEQ ID NO: 9299 - RNA, 20 nt, synthetic construct
  source 1..20: mol_type = other RNA
ccaacagcatagtcaaataa

SEQ ID NO: 9300 - RNA, 20 nt, synthetic construct
  source 1..20: mol_type = other RNA
ccaacctactctctatatcc

SEQ ID NO: 9301 - RNA, 20 nt, synthetic construct
  source 1..20: mol_type = other RNA
ccaatataaacaattaaacc

SEQ ID NO: 9302 - RNA, 20 nt, synthetic construct
  source 1..20: mol_type = other RNA
ccacggtctggagaaggtct

SEQ ID NO: 9303 - RNA, 20 nt, synthetic construct
  source 1..20: mol_type = other RNA
ccagaccgtggaagaccaat

SEQ ID NO: 9304 - RNA, 20 nt, synthetic construct
  source 1..20: mol_type = other RNA
ccagacttttgtagaaaaac

SEQ ID NO: 9305 - RNA, 20 nt, synthetic construct
  source 1..20: mol_type = other RNA
ccattaaaatactgacttac

SEQ ID NO: 9306 - RNA, 20 nt, synthetic construct
  source 1..20: mol_type = other RNA
ccgtggaagaccaatataaa

SEQ ID NO: 9307 - RNA, 20 nt, synthetic construct
  source 1..20: mol_type = other RNA
cctactctctatatccagac

SEQ ID NO: 9308 - RNA, 20 nt, synthetic construct
  source 1..20: mol_type = other RNA
cctgattttctatttctttt

SEQ ID NO: 9309 - RNA, 20 nt, synthetic construct
  source 1..20: mol_type = other RNA
ccttctccagaccgtggaag

SEQ ID NO: 9310 - RNA, 20 nt, synthetic construct
  source 1..20: mol_type = other RNA
cggtctggagaaggtctttg

SEQ ID NO: 9311 - RNA, 20 nt, synthetic construct
  source 1..20: mol_type = other RNA
cgtggaagaccaatataaac

SEQ ID NO: 9312 - RNA, 20 nt, synthetic construct
  source 1..20: mol_type = other RNA
ctacaaaagtctggatatag

SEQ ID NO: 9313 - RNA, 20 nt, synthetic construct
  source 1..20: mol_type = other RNA
ctactctctatatccagact

SEQ ID NO: 9314 - RNA, 20 nt, synthetic construct
  source 1..20: mol_type = other RNA
ctatatccagacttttgtag

SEQ ID NO: 9315 - RNA, 20 nt, synthetic construct
  source 1..20: mol_type = other RNA
ctatgctgttggtttaattg

SEQ ID NO: 9316 - RNA, 20 nt, synthetic construct
  source 1..20: mol_type = other RNA
ctattatcttgtttttctac

SEQ ID NO: 9317 - RNA, 20 nt, synthetic construct
  source 1..20: mol_type = other RNA
ctatttcttttatttgacta

SEQ ID NO: 9318 - RNA, 20 nt, synthetic construct
  source 1..20: mol_type = other RNA
ctccagaccgtggaagacca

SEQ ID NO: 9319 - RNA, 20 nt, synthetic construct
  source 1..20: mol_type = other RNA
ctctatatccagacttttgt

SEQ ID NO: 9320 - RNA, 20 nt, synthetic construct
  source 1..20: mol_type = other RNA
ctctctatatccagactttt

SEQ ID NO: 9321 - RNA, 20 nt, synthetic construct
  source 1..20: mol_type = other RNA
ctgacttacctgattttcta

SEQ ID NO: 9322 - RNA, 20 nt, synthetic construct
  source 1..20: mol_type = other RNA
ctgattttctatttctttta

SEQ ID NO: 9323 - RNA, 20 nt, synthetic construct
  source 1..20: mol_type = other RNA
ctggagaaggtctttgatgc

SEQ ID NO: 9324 - RNA, 20 nt, synthetic construct
  source 1..20: mol_type = other RNA
ctggatatagagagtaggtt

SEQ ID NO: 9325 - RNA, 20 nt, synthetic construct
  source 1..20: mol_type = other RNA
ctgttggtttaattgtttat

SEQ ID NO: 9326 - RNA, 20 nt, synthetic construct
  source 1..20: mol_type = other RNA
cttacctgattttctatttc

SEQ ID NO: 9327 - RNA, 20 nt, synthetic construct
  source 1..20: mol_type = other RNA
cttataaccaacctactctc

SEQ ID NO: 9328 - RNA, 20 nt, synthetic construct
  source 1..20: mol_type = other RNA
cttccacggtctggagaagg

SEQ ID NO: 9329 - RNA, 20 nt, synthetic construct
  source 1..20: mol_type = other RNA
cttctccagaccgtggaaga

SEQ ID NO: 9330 - RNA, 20 nt, synthetic construct
  source 1..20: mol_type = other RNA
cttgtttttctacaaaagtc

SEQ ID NO: 9331 - RNA, 20 nt, synthetic construct
  source 1..20: mol_type = other RNA
ctttgatgctattatcttgt

SEQ ID NO: 9332 - RNA, 20 nt, synthetic construct
  source 1..20: mol_type = other RNA
cttttatttgactatgctgt

SEQ ID NO: 9333 - RNA, 20 nt, synthetic construct
  source 1..20: mol_type = other RNA
cttttgtagaaaaacaagat

SEQ ID NO: 9334 - RNA, 20 nt, synthetic construct
  source 1..20: mol_type = other RNA
gaaaaacaagataatagcat

SEQ ID NO: 9335 - RNA, 20 nt, synthetic construct
  source 1..20: mol_type = other RNA
gaaaatcaggtaagtcagta

SEQ ID NO: 9336 - RNA, 20 nt, synthetic construct
  source 1..20: mol_type = other RNA
gaaatagaaaatcaggtaag

SEQ ID NO: 9337 - RNA, 20 nt, synthetic construct
  source 1..20: mol_type = other RNA
gaagaccaatataaacaatt

SEQ ID NO: 9338 - RNA, 20 nt, synthetic construct
  source 1..20: mol_type = other RNA
gaaggtctttgatgctatta

SEQ ID NO: 9339 - RNA, 20 nt, synthetic construct
  source 1..20: mol_type = other RNA
gacataccattaaaatactg

SEQ ID NO: 9340 - RNA, 20 nt, synthetic construct
  source 1..20: mol_type = other RNA
gaccaatataaacaattaaa

SEQ ID NO: 9341 - RNA, 20 nt, synthetic construct
  source 1..20: mol_type = other RNA
gaccgtggaagaccaatata

SEQ ID NO: 9342 - RNA, 20 nt, synthetic construct
  source 1..20: mol_type = other RNA
gaccttctccagaccgtgga

SEQ ID NO: 9343 - RNA, 20 nt, synthetic construct
  source 1..20: mol_type = other RNA
gactatgctgttggtttaat

SEQ ID NO: 9344 - RNA, 20 nt, synthetic construct
  source 1..20: mol_type = other RNA
gacttacctgattttctatt

SEQ ID NO: 9345 - RNA, 20 nt, synthetic construct
  source 1..20: mol_type = other RNA
gacttttgtagaaaaacaag

SEQ ID NO: 9346 - RNA, 20 nt, synthetic construct
  source 1..20: mol_type = other RNA
gagaaggtctttgatgctat

SEQ ID NO: 9347 - RNA, 20 nt, synthetic construct
  source 1..20: mol_type = other RNA
gataatagcatcaaagacct

SEQ ID NO: 9348 - RNA, 20 nt, synthetic construct
  source 1..20: mol_type = other RNA
gatatagagagtaggttggt

SEQ ID NO: 9349 - RNA, 20 nt, synthetic construct
  source 1..20: mol_type = other RNA
gatgctattatcttgttttt

SEQ ID NO: 9350 - RNA, 20 nt, synthetic construct
  source 1..20: mol_type = other RNA
gcatagtcaaataaaagaaa

SEQ ID NO: 9351 - RNA, 20 nt, synthetic construct
  source 1..20: mol_type = other RNA
gcatcaaagaccttctccag

SEQ ID NO: 9352 - RNA, 20 nt, synthetic construct
  source 1..20: mol_type = other RNA
gctattatcttgtttttcta

SEQ ID NO: 9353 - RNA, 20 nt, synthetic construct
  source 1..20: mol_type = other RNA
gctgttggtttaattgttta

SEQ ID NO: 9354 - RNA, 20 nt, synthetic construct
  source 1..20: mol_type = other RNA
ggaagaccaatataaacaat

SEQ ID NO: 9355 - RNA, 20 nt, synthetic construct
  source 1..20: mol_type = other RNA
ggacataccattaaaatact

SEQ ID NO: 9356 - RNA, 20 nt, synthetic construct
  source 1..20: mol_type = other RNA
ggagaaggtctttgatgcta

SEQ ID NO: 9357 - RNA, 20 nt, synthetic construct
  source 1..20: mol_type = other RNA
ggatatagagagtaggttgg

SEQ ID NO: 9358 - RNA, 20 nt, synthetic construct
  source 1..20: mol_type = other RNA
gggacataccattaaaatac

SEQ ID NO: 9359 - RNA, 20 nt, synthetic construct
  source 1..20: mol_type = other RNA
ggtaagtcagtattttaatg

SEQ ID NO: 9360 - RNA, 20 nt, synthetic construct
  source 1..20: mol_type = other RNA
ggtctggagaaggtctttga

SEQ ID NO: 9361 - RNA, 20 nt, synthetic construct
  source 1..20: mol_type = other RNA
ggtcttccacggtctggaga

SEQ ID NO: 9362 - RNA, 20 nt, synthetic construct
  source 1..20: mol_type = other RNA
ggtctttgatgctattatct

SEQ ID NO: 9363 - RNA, 20 nt, synthetic construct
  source 1..20: mol_type = other RNA
ggtttaattgtttatattgg

SEQ ID NO: 9364 - RNA, 20 nt, synthetic construct
  source 1..20: mol_type = other RNA
gtaagtcagtattttaatgg

SEQ ID NO: 9365 - RNA, 20 nt, synthetic construct
  source 1..20: mol_type = other RNA
gtagaaaaacaagataatag

SEQ ID NO: 9366 - RNA, 20 nt, synthetic construct
  source 1..20: mol_type = other RNA
gtcaaataaaagaaatagaa

SEQ ID NO: 9367 - RNA, 20 nt, synthetic construct
  source 1..20: mol_type = other RNA
gtctggagaaggtctttgat

SEQ ID NO: 9368 - RNA, 20 nt, synthetic construct
  source 1..20: mol_type = other RNA
gtctggatatagagagtagg

SEQ ID NO: 9369 - RNA, 20 nt, synthetic construct
  source 1..20: mol_type = other RNA
gtcttccacggtctggagaa

SEQ ID NO: 9370 - RNA, 20 nt, synthetic construct
  source 1..20: mol_type = other RNA
gtctttgatgctattatctt

SEQ ID NO: 9371 - RNA, 20 nt, synthetic construct
  source 1..20: mol_type = other RNA
gtggaagaccaatataaaca

SEQ ID NO: 9372 - RNA, 20 nt, synthetic construct
  source 1..20: mol_type = other RNA
gttggtttaattgtttatat

SEQ ID NO: 9373 - RNA, 20 nt, synthetic construct
  source 1..20: mol_type = other RNA
gtttaattgtttatattggt

SEQ ID NO: 9374 - RNA, 20 nt, synthetic construct
  source 1..20: mol_type = other RNA
gtttatattggtcttccacg

SEQ ID NO: 9375 - RNA, 20 nt, synthetic construct
  source 1..20: mol_type = other RNA
gtttttctacaaaagtctgg

SEQ ID NO: 9376 - RNA, 20 nt, synthetic construct
  source 1..20: mol_type = other RNA
taaaagaaatagaaaatcag

SEQ ID NO: 9377 - RNA, 20 nt, synthetic construct
  source 1..20: mol_type = other RNA
taaaatactgacttacctga

SEQ ID NO: 9378 - RNA, 20 nt, synthetic construct
  source 1..20: mol_type = other RNA
taaacaattaaaccaacagc

SEQ ID NO: 9379 - RNA, 20 nt, synthetic construct
  source 1..20: mol_type = other RNA
taaaccaacagcatagtcaa

SEQ ID NO: 9380 - RNA, 20 nt, synthetic construct
  source 1..20: mol_type = other RNA
taaccaacctactctctata

SEQ ID NO: 9381 - RNA, 20 nt, synthetic construct
  source 1..20: mol_type = other RNA
taagtcagtattttaatggt

SEQ ID NO: 9382 - RNA, 20 nt, synthetic construct
  source 1..20: mol_type = other RNA
taatagcatcaaagaccttc

SEQ ID NO: 9383 - RNA, 20 nt, synthetic construct
  source 1..20: mol_type = other RNA
taattgtttatattggtctt

SEQ ID NO: 9384 - RNA, 20 nt, synthetic construct
  source 1..20: mol_type = other RNA
tacaaaagtctggatataga

SEQ ID NO: 9385 - RNA, 20 nt, synthetic construct
  source 1..20: mol_type = other RNA
taccattaaaatactgactt

SEQ ID NO: 9386 - RNA, 20 nt, synthetic construct
  source 1..20: mol_type = other RNA
tacctgattttctatttctt

SEQ ID NO: 9387 - RNA, 20 nt, synthetic construct
  source 1..20: mol_type = other RNA
tactctctatatccagactt

SEQ ID NO: 9388 - RNA, 20 nt, synthetic construct
  source 1..20: mol_type = other RNA
tactgacttacctgattttc

SEQ ID NO: 9389 - RNA, 20 nt, synthetic construct
  source 1..20: mol_type = other RNA
tagaaaaacaagataatagc

SEQ ID NO: 9390 - RNA, 20 nt, synthetic construct
  source 1..20: mol_type = other RNA
tagaaaatcaggtaagtcag

SEQ ID NO: 9391 - RNA, 20 nt, synthetic construct
  source 1..20: mol_type = other RNA
tagcatcaaagaccttctcc

SEQ ID NO: 9392 - RNA, 20 nt, synthetic construct
  source 1..20: mol_type = other RNA
tagtcaaataaaagaaatag

SEQ ID NO: 9393 - RNA, 20 nt, synthetic construct
  source 1..20: mol_type = other RNA
tataaacaattaaaccaaca

SEQ ID NO: 9394 - RNA, 20 nt, synthetic construct
  source 1..20: mol_type = other RNA
tataaccaacctactctcta

SEQ ID NO: 9395 - RNA, 20 nt, synthetic construct
  source 1..20: mol_type = other RNA
tatatccagacttttgtaga

SEQ ID NO: 9396 - RNA, 20 nt, synthetic construct
  source 1..20: mol_type = other RNA
tatattggtcttccacggtc

SEQ ID NO: 9397 - RNA, 20 nt, synthetic construct
  source 1..20: mol_type = other RNA
tatccagacttttgtagaaa

SEQ ID NO: 9398 - RNA, 20 nt, synthetic construct
  source 1..20: mol_type = other RNA
tatcttgtttttctacaaaa

SEQ ID NO: 9399 - RNA, 20 nt, synthetic construct
  source 1..20: mol_type = other RNA
tatgctgttggtttaattgt

SEQ ID NO: 9400 - RNA, 20 nt, synthetic construct
  source 1..20: mol_type = other RNA
tattatcttgtttttctaca

SEQ ID NO: 9401 - RNA, 20 nt, synthetic construct
  source 1..20: mol_type = other RNA
tattggtcttccacggtctg

SEQ ID NO: 9402 - RNA, 20 nt, synthetic construct
  source 1..20: mol_type = other RNA
tatttgactatgctgttggt

SEQ ID NO: 9403 - RNA, 20 nt, synthetic construct
  source 1..20: mol_type = other RNA
tcaaagaccttctccagacc

SEQ ID NO: 9404 - RNA, 20 nt, synthetic construct
  source 1..20: mol_type = other RNA
tcaggtaagtcagtatttta

SEQ ID NO: 9405 - RNA, 20 nt, synthetic construct
  source 1..20: mol_type = other RNA
tccacggtctggagaaggtc

SEQ ID NO: 9406 - RNA, 20 nt, synthetic construct
  source 1..20: mol_type = other RNA
tccagaccgtggaagaccaa

SEQ ID NO: 9407 - RNA, 20 nt, synthetic construct
  source 1..20: mol_type = other RNA
tccagacttttgtagaaaaa

SEQ ID NO: 9408 - RNA, 20 nt, synthetic construct
  source 1..20: mol_type = other RNA
tctacaaaagtctggatata

SEQ ID NO: 9409 - RNA, 20 nt, synthetic construct
  source 1..20: mol_type = other RNA
tctatatccagacttttgta

SEQ ID NO: 9410 - RNA, 20 nt, synthetic construct
  source 1..20: mol_type = other RNA
tctatttcttttatttgact

SEQ ID NO: 9411 - RNA, 20 nt, synthetic construct
  source 1..20: mol_type = other RNA
tctccagaccgtggaagacc

SEQ ID NO: 9412 - RNA, 20 nt, synthetic construct
  source 1..20: mol_type = other RNA
tctctatatccagacttttg

SEQ ID NO: 9413 - RNA, 20 nt, synthetic construct
  source 1..20: mol_type = other RNA
tctggagaaggtctttgatg

SEQ ID NO: 9414 - RNA, 20 nt, synthetic construct
  source 1..20: mol_type = other RNA
tctggatatagagagtaggt

SEQ ID NO: 9415 - RNA, 20 nt, synthetic construct
  source 1..20: mol_type = other RNA
tcttccacggtctggagaag

SEQ ID NO: 9416 - RNA, 20 nt, synthetic construct
  source 1..20: mol_type = other RNA
tcttgtttttctacaaaagt

SEQ ID NO: 9417 - RNA, 20 nt, synthetic construct
  source 1..20: mol_type = other RNA
tctttgatgctattatcttg

SEQ ID NO: 9418 - RNA, 20 nt, synthetic construct
  source 1..20: mol_type = other RNA
tcttttatttgactatgctg

SEQ ID NO: 9419 - RNA, 20 nt, synthetic construct
  source 1..20: mol_type = other RNA
tgactatgctgttggtttaa

SEQ ID NO: 9420 - RNA, 20 nt, synthetic construct
  source 1..20: mol_type = other RNA
tgacttacctgattttctat

SEQ ID NO: 9421 - RNA, 20 nt, synthetic construct
  source 1..20: mol_type = other RNA
tgatgctattatcttgtttt

SEQ ID NO: 9422 - RNA, 20 nt, synthetic construct
  source 1..20: mol_type = other RNA
tgctattatcttgtttttct

SEQ ID NO: 9423 - RNA, 20 nt, synthetic construct
  source 1..20: mol_type = other RNA
tgctgttggtttaattgttt

SEQ ID NO: 9424 - RNA, 20 nt, synthetic construct
  source 1..20: mol_type = other RNA
tggaagaccaatataaacaa

SEQ ID NO: 9425 - RNA, 20 nt, synthetic construct
  source 1..20: mol_type = other RNA
tggagaaggtctttgatgct

SEQ ID NO: 9426 - RNA, 20 nt, synthetic construct
  source 1..20: mol_type = other RNA
tggatatagagagtaggttg

SEQ ID NO: 9427 - RNA, 20 nt, synthetic construct
  source 1..20: mol_type = other RNA
tgggacataccattaaaata

SEQ ID NO: 9428 - RNA, 20 nt, synthetic construct
  source 1..20: mol_type = other RNA
tggtcttccacggtctggag

SEQ ID NO: 9429 - RNA, 20 nt, synthetic construct
  source 1..20: mol_type = other RNA
tggtttaattgtttatattg

SEQ ID NO: 9430 - RNA, 20 nt, synthetic construct
  source 1..20: mol_type = other RNA
tgtagaaaaacaagataata

SEQ ID NO: 9431 - RNA, 20 nt, synthetic construct
  source 1..20: mol_type = other RNA
tgttggtttaattgtttata

SEQ ID NO: 9432 - RNA, 20 nt, synthetic construct
  source 1..20: mol_type = other RNA
tgtttatattggtcttccac

SEQ ID NO: 9433 - RNA, 20 nt, synthetic construct
  source 1..20: mol_type = other RNA
tgtttttctacaaaagtctg

SEQ ID NO: 9434 - RNA, 20 nt, synthetic construct
  source 1..20: mol_type = other RNA
ttaaaatactgacttacctg

SEQ ID NO: 9435 - RNA, 20 nt, synthetic construct
  source 1..20: mol_type = other RNA
ttaaaccaacagcatagtca

SEQ ID NO: 9436 - RNA, 20 nt, synthetic construct
  source 1..20: mol_type = other RNA
ttaattgtttatattggtct

SEQ ID NO: 9437 - RNA, 20 nt, synthetic construct
  source 1..20: mol_type = other RNA
ttacctgattttctatttct

SEQ ID NO: 9438 - RNA, 20 nt, synthetic construct
  source 1..20: mol_type = other RNA
ttataaccaacctactctct

SEQ ID NO: 9439 - RNA, 20 nt, synthetic construct
  source 1..20: mol_type = other RNA
ttatattggtcttccacggt

SEQ ID NO: 9440 - RNA, 20 nt, synthetic construct
  source 1..20: mol_type = other RNA
ttatcttgtttttctacaaa

SEQ ID NO: 9441 - RNA, 20 nt, synthetic construct
  source 1..20: mol_type = other RNA
ttatttgactatgctgttgg

SEQ ID NO: 9442 - RNA, 20 nt, synthetic construct
  source 1..20: mol_type = other RNA
ttccacggtctggagaaggt

SEQ ID NO: 9443 - RNA, 20 nt, synthetic construct
  source 1..20: mol_type = other RNA
ttctacaaaagtctggatat

SEQ ID NO: 9444 - RNA, 20 nt, synthetic construct
  source 1..20: mol_type = other RNA
ttctatttcttttatttgac

SEQ ID NO: 9445 - RNA, 20 nt, synthetic construct
  source 1..20: mol_type = other RNA
ttctccagaccgtggaagac

SEQ ID NO: 9446 - RNA, 20 nt, synthetic construct
  source 1..20: mol_type = other RNA
ttcttttatttgactatgct

SEQ ID NO: 9447 - RNA, 20 nt, synthetic construct
  source 1..20: mol_type = other RNA
ttgactatgctgttggttta

SEQ ID NO: 9448 - RNA, 20 nt, synthetic construct
  source 1..20: mol_type = other RNA
ttgatgctattatcttgttt

SEQ ID NO: 9449 - RNA, 20 nt, synthetic construct
  source 1..20: mol_type = other RNA
ttggtcttccacggtctgga

SEQ ID NO: 9450 - RNA, 20 nt, synthetic construct
  source 1..20: mol_type = other RNA
ttgtagaaaaacaagataat

SEQ ID NO: 9451 - RNA, 20 nt, synthetic construct
  source 1..20: mol_type = other RNA
ttgtttatattggtcttcca

SEQ ID NO: 9452 - RNA, 20 nt, synthetic construct
  source 1..20: mol_type = other RNA
ttgtttttctacaaaagtct

SEQ ID NO: 9453 - RNA, 20 nt, synthetic construct
  source 1..20: mol_type = other RNA
tttaattgtttatattggtc

SEQ ID NO: 9454 - RNA, 20 nt, synthetic construct
  source 1..20: mol_type = other RNA
tttatattggtcttccacgg

SEQ ID NO: 9455 - RNA, 20 nt, synthetic construct
  source 1..20: mol_type = other RNA
tttatttgactatgctgttg

SEQ ID NO: 9456 - RNA, 20 nt, synthetic construct
  source 1..20: mol_type = other RNA
tttctacaaaagtctggata

SEQ ID NO: 9457 - RNA, 20 nt, synthetic construct
  source 1..20: mol_type = other RNA
tttcttttatttgactatgc

SEQ ID NO: 9458 - RNA, 20 nt, synthetic construct
  source 1..20: mol_type = other RNA
tttgactatgctgttggttt

SEQ ID NO: 9459 - RNA, 20 nt, synthetic construct
  source 1..20: mol_type = other RNA
tttgatgctattatcttgtt

SEQ ID NO: 9460 - RNA, 20 nt, synthetic construct
  source 1..20: mol_type = other RNA
tttgtagaaaaacaagataa

SEQ ID NO: 9461 - RNA, 20 nt, synthetic construct
  source 1..20: mol_type = other RNA
ttttatttgactatgctgtt

SEQ ID NO: 9462 - RNA, 20 nt, synthetic construct
  source 1..20: mol_type = other RNA
ttttctacaaaagtctggat

SEQ ID NO: 9463 - RNA, 20 nt, synthetic construct
  source 1..20: mol_type = other RNA
ttttgtagaaaaacaagata

SEQ ID NO: 9464 - RNA, 20 nt, synthetic construct
  source 1..20: mol_type = other RNA
tttttctacaaaagtctgga

SEQ ID NO: 9465 - RNA, 21 nt, synthetic construct
  source 1..21: mol_type = other RNA
aaaaacaagataatagcatca

SEQ ID NO: 9466 - RNA, 21 nt, synthetic construct
  source 1..21: mol_type = other RNA
aaaacaagataatagcatcaa

SEQ ID NO: 9467 - RNA, 21 nt, synthetic construct
  source 1..21: mol_type = other RNA
aaaagaaatagaaaatcaggt

SEQ ID NO: 9468 - RNA, 21 nt, synthetic construct
  source 1..21: mol_type = other RNA
aaaagtctggatatagagagt

SEQ ID NO: 9469 - RNA, 21 nt, synthetic construct
  source 1..21: mol_type = other RNA
aaaatactgacttacctgatt

SEQ ID NO: 9470 - RNA, 21 nt, synthetic construct
  source 1..21: mol_type = other RNA
aaaatcaggtaagtcagtatt

SEQ ID NO: 9471 - RNA, 21 nt, synthetic construct
  source 1..21: mol_type = other RNA
aaacaagataatagcatcaaa

SEQ ID NO: 9472 - RNA, 21 nt, synthetic construct
  source 1..21: mol_type = other RNA
aaacaattaaaccaacagcat

SEQ ID NO: 9473 - RNA, 21 nt, synthetic construct
  source 1..21: mol_type = other RNA
aaaccaacagcatagtcaaat

SEQ ID NO: 9474 - RNA, 21 nt, synthetic construct
  source 1..21: mol_type = other RNA
aaagaaatagaaaatcaggta

SEQ ID NO: 9475 - RNA, 21 nt, synthetic construct
  source 1..21: mol_type = other RNA
aaagaccttctccagaccgtg

SEQ ID NO: 9476 - RNA, 21 nt, synthetic construct
  source 1..21: mol_type = other RNA
aaagtctggatatagagagta

SEQ ID NO: 9477 - RNA, 21 nt, synthetic construct
  source 1..21: mol_type = other RNA
aaatactgacttacctgattt

SEQ ID NO: 9478 - RNA, 21 nt, synthetic construct
  source 1..21: mol_type = other RNA
aaatagaaaatcaggtaagtc

SEQ ID NO: 9479 - RNA, 21 nt, synthetic construct
  source 1..21: mol_type = other RNA
aaatcaggtaagtcagtattt

SEQ ID NO: 9480 - RNA, 21 nt, synthetic construct
  source 1..21: mol_type = other RNA
aacaagataatagcatcaaag

SEQ ID NO: 9481 - RNA, 21 nt, synthetic construct
  source 1..21: mol_type = other RNA
aacaattaaaccaacagcata

SEQ ID NO: 9482 - RNA, 21 nt, synthetic construct
  source 1..21: mol_type = other RNA
aacagcatagtcaaataaaag

SEQ ID NO: 9483 - RNA, 21 nt, synthetic construct
  source 1..21: mol_type = other RNA
aaccaacagcatagtcaaata

SEQ ID NO: 9484 - RNA, 21 nt, synthetic construct
  source 1..21: mol_type = other RNA
aaccaacctactctctatatc

SEQ ID NO: 9485 - RNA, 21 nt, synthetic construct
  source 1..21: mol_type = other RNA
aacctactctctatatccaga

SEQ ID NO: 9486 - RNA, 21 nt, synthetic construct
  source 1..21: mol_type = other RNA
aacttataaccaacctactct

SEQ ID NO: 9487 - RNA, 21 nt, synthetic construct
  source 1..21: mol_type = other RNA
aagaaatagaaaatcaggtaa

SEQ ID NO: 9488 - RNA, 21 nt, synthetic construct
  source 1..21: mol_type = other RNA
aagaccttctccagaccgtgg

SEQ ID NO: 9489 - RNA, 21 nt, synthetic construct
  source 1..21: mol_type = other RNA
aagataatagcatcaaagacc

SEQ ID NO: 9490 - RNA, 21 nt, synthetic construct
  source 1..21: mol_type = other RNA
aaggtctttgatgctattatc

SEQ ID NO: 9491 - RNA, 21 nt, synthetic construct
  source 1..21: mol_type = other RNA
aagtctggatatagagagtag

SEQ ID NO: 9492 - RNA, 21 nt, synthetic construct
  source 1..21: mol_type = other RNA
aatactgacttacctgatttt

SEQ ID NO: 9493 - RNA, 21 nt, synthetic construct
  source 1..21: mol_type = other RNA
aatagaaaatcaggtaagtca

SEQ ID NO: 9494 - RNA, 21 nt, synthetic construct
  source 1..21: mol_type = other RNA
aatagcatcaaagaccttctc

SEQ ID NO: 9495 - RNA, 21 nt, synthetic construct
  source 1..21: mol_type = other RNA
aatcaggtaagtcagtatttt

SEQ ID NO: 9496 - RNA, 21 nt, synthetic construct
  source 1..21: mol_type = other RNA
aattaaaccaacagcatagtc

SEQ ID NO: 9497 - RNA, 21 nt, synthetic construct
  source 1..21: mol_type = other RNA
aattgtttatattggtcttcc

SEQ ID NO: 9498 - RNA, 21 nt, synthetic construct
  source 1..21: mol_type = other RNA
acaaaagtctggatatagaga

SEQ ID NO: 9499 - RNA, 21 nt, synthetic construct
  source 1..21: mol_type = other RNA
acaagataatagcatcaaaga

SEQ ID NO: 9500 - RNA, 21 nt, synthetic construct
  source 1..21: mol_type = other RNA
acaattaaaccaacagcatag

SEQ ID NO: 9501 - RNA, 21 nt, synthetic construct
  source 1..21: mol_type = other RNA
acagcatagtcaaataaaaga

SEQ ID NO: 9502 - RNA, 21 nt, synthetic construct
  source 1..21: mol_type = other RNA
acataccattaaaatactgac

SEQ ID NO: 9503 - RNA, 21 nt, synthetic construct
  source 1..21: mol_type = other RNA
accaacagcatagtcaaataa

SEQ ID NO: 9504 - RNA, 21 nt, synthetic construct
  source 1..21: mol_type = other RNA
accaacctactctctatatcc

SEQ ID NO: 9505 - RNA, 21 nt, synthetic construct
  source 1..21: mol_type = other RNA
accaatataaacaattaaacc

SEQ ID NO: 9506 - RNA, 21 nt, synthetic construct
  source 1..21: mol_type = other RNA
accattaaaatactgacttac

SEQ ID NO: 9507 - RNA, 21 nt, synthetic construct
  source 1..21: mol_type = other RNA
accgtggaagaccaatataaa

SEQ ID NO: 9508 - RNA, 21 nt, synthetic construct
  source 1..21: mol_type = other RNA
acctactctctatatccagac

SEQ ID NO: 9509 - RNA, 21 nt, synthetic construct
  source 1..21: mol_type = other RNA
acctgattttctatttctttt

SEQ ID NO: 9510 - RNA, 21 nt, synthetic construct
  source 1..21: mol_type = other RNA
accttctccagaccgtggaag

SEQ ID NO: 9511 - RNA, 21 nt, synthetic construct
  source 1..21: mol_type = other RNA
acggtctggagaaggtctttg

SEQ ID NO: 9512 - RNA, 21 nt, synthetic construct
  source 1..21: mol_type = other RNA
actatgctgttggtttaattg

SEQ ID NO: 9513 - RNA, 21 nt, synthetic construct
  source 1..21: mol_type = other RNA
actctctatatccagactttt

SEQ ID NO: 9514 - RNA, 21 nt, synthetic construct
  source 1..21: mol_type = other RNA
actgacttacctgattttcta

SEQ ID NO: 9515 - RNA, 21 nt, synthetic construct
  source 1..21: mol_type = other RNA
acttacctgattttctatttc

SEQ ID NO: 9516 - RNA, 21 nt, synthetic construct
  source 1..21: mol_type = other RNA
acttataaccaacctactctc

SEQ ID NO: 9517 - RNA, 21 nt, synthetic construct
  source 1..21: mol_type = other RNA
acttttgtagaaaaacaagat

SEQ ID NO: 9518 - RNA, 21 nt, synthetic construct
  source 1..21: mol_type = other RNA
agaaaaacaagataatagcat

SEQ ID NO: 9519 - RNA, 21 nt, synthetic construct
  source 1..21: mol_type = other RNA
agaaaatcaggtaagtcagta

SEQ ID NO: 9520 - RNA, 21 nt, synthetic construct
  source 1..21: mol_type = other RNA
agaaatagaaaatcaggtaag

SEQ ID NO: 9521 - RNA, 21 nt, synthetic construct
  source 1..21: mol_type = other RNA
agaaggtctttgatgctatta

SEQ ID NO: 9522 - RNA, 21 nt, synthetic construct
  source 1..21: mol_type = other RNA
agaccgtggaagaccaatata

SEQ ID NO: 9523 - RNA, 21 nt, synthetic construct
  source 1..21: mol_type = other RNA
agaccttctccagaccgtgga

SEQ ID NO: 9524 - RNA, 21 nt, synthetic construct
  source 1..21: mol_type = other RNA
agacttttgtagaaaaacaag

SEQ ID NO: 9525 - RNA, 21 nt, synthetic construct
  source 1..21: mol_type = other RNA
agataatagcatcaaagacct

SEQ ID NO: 9526 - RNA, 21 nt, synthetic construct
  source 1..21: mol_type = other RNA
agcatagtcaaataaaagaaa

SEQ ID NO: 9527 - RNA, 21 nt, synthetic construct
  source 1..21: mol_type = other RNA
agcatcaaagaccttctccag

SEQ ID NO: 9528 - RNA, 21 nt, synthetic construct
  source 1..21: mol_type = other RNA
aggtaagtcagtattttaatg

SEQ ID NO: 9529 - RNA, 21 nt, synthetic construct
  source 1..21: mol_type = other RNA
aggtctttgatgctattatct

SEQ ID NO: 9530 - RNA, 21 nt, synthetic construct
  source 1..21: mol_type = other RNA
agtctggatatagagagtagg

SEQ ID NO: 9531 - RNA, 21 nt, synthetic construct
  source 1..21: mol_type = other RNA
ataaacaattaaaccaacagc

SEQ ID NO: 9532 - RNA, 21 nt, synthetic construct
  source 1..21: mol_type = other RNA
ataaccaacctactctctata

SEQ ID NO: 9533 - RNA, 21 nt, synthetic construct
  source 1..21: mol_type = other RNA
ataatagcatcaaagaccttc

SEQ ID NO: 9534 - RNA, 21 nt, synthetic construct
  source 1..21: mol_type = other RNA
ataccattaaaatactgactt

SEQ ID NO: 9535 - RNA, 21 nt, synthetic construct
  source 1..21: mol_type = other RNA
atactgacttacctgattttc

SEQ ID NO: 9536 - RNA, 21 nt, synthetic construct
  source 1..21: mol_type = other RNA
atagaaaatcaggtaagtcag

SEQ ID NO: 9537 - RNA, 21 nt, synthetic construct
  source 1..21: mol_type = other RNA
atagcatcaaagaccttctcc

SEQ ID NO: 9538 - RNA, 21 nt, synthetic construct
  source 1..21: mol_type = other RNA
atatccagacttttgtagaaa

SEQ ID NO: 9539 - RNA, 21 nt, synthetic construct
  source 1..21: mol_type = other RNA
atattggtcttccacggtctg

SEQ ID NO: 9540 - RNA, 21 nt, synthetic construct
  source 1..21: mol_type = other RNA
atcaaagaccttctccagacc

SEQ ID NO: 9541 - RNA, 21 nt, synthetic construct
  source 1..21: mol_type = other RNA
atcaggtaagtcagtatttta

SEQ ID NO: 9542 - RNA, 21 nt, synthetic construct
  source 1..21: mol_type = other RNA
atccagacttttgtagaaaaa

SEQ ID NO: 9543 - RNA, 21 nt, synthetic construct
  source 1..21: mol_type = other RNA
atcttgtttttctacaaaagt

SEQ ID NO: 9544 - RNA, 21 nt, synthetic construct
  source 1..21: mol_type = other RNA
atgctattatcttgtttttct

SEQ ID NO: 9545 - RNA, 21 nt, synthetic construct
  source 1..21: mol_type = other RNA
atgctgttggtttaattgttt

SEQ ID NO: 9546 - RNA, 21 nt, synthetic construct
  source 1..21: mol_type = other RNA
atgggacataccattaaaata

SEQ ID NO: 9547 - RNA, 21 nt, synthetic construct
  source 1..21: mol_type = other RNA
attaaaatactgacttacctg

SEQ ID NO: 9548 - RNA, 21 nt, synthetic construct
  source 1..21: mol_type = other RNA
attaaaccaacagcatagtca

SEQ ID NO: 9549 - RNA, 21 nt, synthetic construct
  source 1..21: mol_type = other RNA
attggtcttccacggtctgga

SEQ ID NO: 9550 - RNA, 21 nt, synthetic construct
  source 1..21: mol_type = other RNA
attgtttatattggtcttcca

SEQ ID NO: 9551 - RNA, 21 nt, synthetic construct
  source 1..21: mol_type = other RNA
atttcttttatttgactatgc

SEQ ID NO: 9552 - RNA, 21 nt, synthetic construct
  source 1..21: mol_type = other RNA
atttgactatgctgttggttt

SEQ ID NO: 9553 - RNA, 21 nt, synthetic construct
  source 1..21: mol_type = other RNA
caaaagtctggatatagagag

SEQ ID NO: 9554 - RNA, 21 nt, synthetic construct
  source 1..21: mol_type = other RNA
caaagaccttctccagaccgt

SEQ ID NO: 9555 - RNA, 21 nt, synthetic construct
  source 1..21: mol_type = other RNA
caacagcatagtcaaataaaa

SEQ ID NO: 9556 - RNA, 21 nt, synthetic construct
  source 1..21: mol_type = other RNA
caacctactctctatatccag

SEQ ID NO: 9557 - RNA, 21 nt, synthetic construct
  source 1..21: mol_type = other RNA
caagataatagcatcaaagac

SEQ ID NO: 9558 - RNA, 21 nt, synthetic construct
  source 1..21: mol_type = other RNA
caattaaaccaacagcatagt

SEQ ID NO: 9559 - RNA, 21 nt, synthetic construct
  source 1..21: mol_type = other RNA
cacggtctggagaaggtcttt

SEQ ID NO: 9560 - RNA, 21 nt, synthetic construct
  source 1..21: mol_type = other RNA
cagaccgtggaagaccaatat

SEQ ID NO: 9561 - RNA, 21 nt, synthetic construct
  source 1..21: mol_type = other RNA
cagacttttgtagaaaaacaa

SEQ ID NO: 9562 - RNA, 21 nt, synthetic construct
  source 1..21: mol_type = other RNA
cagcatagtcaaataaaagaa

SEQ ID NO: 9563 - RNA, 21 nt, synthetic construct
  source 1..21: mol_type = other RNA
caggtaagtcagtattttaat

SEQ ID NO: 9564 - RNA, 21 nt, synthetic construct
  source 1..21: mol_type = other RNA
cataccattaaaatactgact

SEQ ID NO: 9565 - RNA, 21 nt, synthetic construct
  source 1..21: mol_type = other RNA
catcaaagaccttctccagac

SEQ ID NO: 9566 - RNA, 21 nt, synthetic construct
  source 1..21: mol_type = other RNA
cattaaaatactgacttacct

SEQ ID NO: 9567 - RNA, 21 nt, synthetic construct
  source 1..21: mol_type = other RNA
ccaacagcatagtcaaataaa

SEQ ID NO: 9568 - RNA, 21 nt, synthetic construct
  source 1..21: mol_type = other RNA
ccaacctactctctatatcca

SEQ ID NO: 9569 - RNA, 21 nt, synthetic construct
  source 1..21: mol_type = other RNA
ccaatataaacaattaaacca

SEQ ID NO: 9570 - RNA, 21 nt, synthetic construct
  source 1..21: mol_type = other RNA
ccacggtctggagaaggtctt

SEQ ID NO: 9571 - RNA, 21 nt, synthetic construct
  source 1..21: mol_type = other RNA
ccagaccgtggaagaccaata

SEQ ID NO: 9572 - RNA, 21 nt, synthetic construct
  source 1..21: mol_type = other RNA
ccagacttttgtagaaaaaca

SEQ ID NO: 9573 - RNA, 21 nt, synthetic construct
  source 1..21: mol_type = other RNA
ccattaaaatactgacttacc

SEQ ID NO: 9574 - RNA, 21 nt, synthetic construct
  source 1..21: mol_type = other RNA
ccgtggaagaccaatataaac

SEQ ID NO: 9575 - RNA, 21 nt, synthetic construct
  source 1..21: mol_type = other RNA
cctactctctatatccagact

SEQ ID NO: 9576 - RNA, 21 nt, synthetic construct
  source 1..21: mol_type = other RNA
cctgattttctatttctttta

SEQ ID NO: 9577 - RNA, 21 nt, synthetic construct
  source 1..21: mol_type = other RNA
ccttctccagaccgtggaaga

SEQ ID NO: 9578 - RNA, 21 nt, synthetic construct
  source 1..21: mol_type = other RNA
cggtctggagaaggtctttga

SEQ ID NO: 9579 - RNA, 21 nt, synthetic construct
  source 1..21: mol_type = other RNA
cgtggaagaccaatataaaca

SEQ ID NO: 9580 - RNA, 21 nt, synthetic construct
  source 1..21: mol_type = other RNA
ctacaaaagtctggatataga

SEQ ID NO: 9581 - RNA, 21 nt, synthetic construct
  source 1..21: mol_type = other RNA
ctactctctatatccagactt

SEQ ID NO: 9582 - RNA, 21 nt, synthetic construct
  source 1..21: mol_type = other RNA
ctatatccagacttttgtaga

SEQ ID NO: 9583 - RNA, 21 nt, synthetic construct
  source 1..21: mol_type = other RNA
ctatgctgttggtttaattgt

SEQ ID NO: 9584 - RNA, 21 nt, synthetic construct
  source 1..21: mol_type = other RNA
ctattatcttgtttttctaca

SEQ ID NO: 9585 - RNA, 21 nt, synthetic construct
  source 1..21: mol_type = other RNA
ctccagaccgtggaagaccaa

SEQ ID NO: 9586 - RNA, 21 nt, synthetic construct
  source 1..21: mol_type = other RNA
ctctatatccagacttttgta

SEQ ID NO: 9587 - RNA, 21 nt, synthetic construct
  source 1..21: mol_type = other RNA
ctctctatatccagacttttg

SEQ ID NO: 9588 - RNA, 21 nt, synthetic construct
  source 1..21: mol_type = other RNA
ctgacttacctgattttctat

SEQ ID NO: 9589 - RNA, 21 nt, synthetic construct
  source 1..21: mol_type = other RNA
ctggagaaggtctttgatgct

SEQ ID NO: 9590 - RNA, 21 nt, synthetic construct
  source 1..21: mol_type = other RNA
ctggatatagagagtaggttg

SEQ ID NO: 9591 - RNA, 21 nt, synthetic construct
  source 1..21: mol_type = other RNA
ctgttggtttaattgtttata

SEQ ID NO: 9592 - RNA, 21 nt, synthetic construct
  source 1..21: mol_type = other RNA
cttacctgattttctatttct

SEQ ID NO: 9593 - RNA, 21 nt, synthetic construct
  source 1..21: mol_type = other RNA
cttataaccaacctactctct

SEQ ID NO: 9594 - RNA, 21 nt, synthetic construct
  source 1..21: mol_type = other RNA
cttccacggtctggagaaggt

SEQ ID NO: 9595 - RNA, 21 nt, synthetic construct
  source 1..21: mol_type = other RNA
cttctccagaccgtggaagac

SEQ ID NO: 9596 - RNA, 21 nt, synthetic construct
  source 1..21: mol_type = other RNA
cttgtttttctacaaaagtct

SEQ ID NO: 9597 - RNA, 21 nt, synthetic construct
  source 1..21: mol_type = other RNA
ctttgatgctattatcttgtt

SEQ ID NO: 9598 - RNA, 21 nt, synthetic construct
  source 1..21: mol_type = other RNA
cttttatttgactatgctgtt

SEQ ID NO: 9599 - RNA, 21 nt, synthetic construct
  source 1..21: mol_type = other RNA
cttttgtagaaaaacaagata

SEQ ID NO: 9600 - RNA, 21 nt, synthetic construct
  source 1..21: mol_type = other RNA
gaaaaacaagataatagcatc

SEQ ID NO: 9601 - RNA, 21 nt, synthetic construct
  source 1..21: mol_type = other RNA
gaaaatcaggtaagtcagtat

SEQ ID NO: 9602 - RNA, 21 nt, synthetic construct
  source 1..21: mol_type = other RNA
gaaatagaaaatcaggtaagt

SEQ ID NO: 9603 - RNA, 21 nt, synthetic construct
  source 1..21: mol_type = other RNA
gaagaccaatataaacaatta

SEQ ID NO: 9604 - RNA, 21 nt, synthetic construct
  source 1..21: mol_type = other RNA
gaaggtctttgatgctattat

SEQ ID NO: 9605 - RNA, 21 nt, synthetic construct
  source 1..21: mol_type = other RNA
gacataccattaaaatactga

SEQ ID NO: 9606 - RNA, 21 nt, synthetic construct
  source 1..21: mol_type = other RNA
gaccaatataaacaattaaac

SEQ ID NO: 9607 - RNA, 21 nt, synthetic construct
  source 1..21: mol_type = other RNA
gaccgtggaagaccaatataa

SEQ ID NO: 9608 - RNA, 21 nt, synthetic construct
  source 1..21: mol_type = other RNA
gaccttctccagaccgtggaa

SEQ ID NO: 9609 - RNA, 21 nt, synthetic construct
  source 1..21: mol_type = other RNA
gactatgctgttggtttaatt

SEQ ID NO: 9610 - RNA, 21 nt, synthetic construct
  source 1..21: mol_type = other RNA
gacttacctgattttctattt

SEQ ID NO: 9611 - RNA, 21 nt, synthetic construct
  source 1..21: mol_type = other RNA
gacttttgtagaaaaacaaga

SEQ ID NO: 9612 - RNA, 21 nt, synthetic construct
  source 1..21: mol_type = other RNA
gagaaggtctttgatgctatt

SEQ ID NO: 9613 - RNA, 21 nt, synthetic construct
  source 1..21: mol_type = other RNA
gataatagcatcaaagacctt

SEQ ID NO: 9614 - RNA, 21 nt, synthetic construct
  source 1..21: mol_type = other RNA
gatgctattatcttgtttttc

SEQ ID NO: 9615 - RNA, 21 nt, synthetic construct
  source 1..21: mol_type = other RNA
gcatagtcaaataaaagaaat

SEQ ID NO: 9616 - RNA, 21 nt, synthetic construct
  source 1..21: mol_type = other RNA
gcatcaaagaccttctccaga

SEQ ID NO: 9617 - RNA, 21 nt, synthetic construct
  source 1..21: mol_type = other RNA
gctattatcttgtttttctac

SEQ ID NO: 9618 - RNA, 21 nt, synthetic construct
  source 1..21: mol_type = other RNA
gctgttggtttaattgtttat

SEQ ID NO: 9619 - RNA, 21 nt, synthetic construct
  source 1..21: mol_type = other RNA
ggaagaccaatataaacaatt

SEQ ID NO: 9620 - RNA, 21 nt, synthetic construct
  source 1..21: mol_type = other RNA
ggacataccattaaaatactg

SEQ ID NO: 9621 - RNA, 21 nt, synthetic construct
  source 1..21: mol_type = other RNA
ggagaaggtctttgatgctat

SEQ ID NO: 9622 - RNA, 21 nt, synthetic construct
  source 1..21: mol_type = other RNA
ggatatagagagtaggttggt

SEQ ID NO: 9623 - RNA, 21 nt, synthetic construct
  source 1..21: mol_type = other RNA
gggacataccattaaaatact

SEQ ID NO: 9624 - RNA, 21 nt, synthetic construct
  source 1..21: mol_type = other RNA
ggtaagtcagtattttaatgg

SEQ ID NO: 9625 - RNA, 21 nt, synthetic construct
  source 1..21: mol_type = other RNA
ggtctggagaaggtctttgat

SEQ ID NO: 9626 - RNA, 21 nt, synthetic construct
  source 1..21: mol_type = other RNA
ggtcttccacggtctggagaa

SEQ ID NO: 9627 - RNA, 21 nt, synthetic construct
  source 1..21: mol_type = other RNA
ggtctttgatgctattatctt

SEQ ID NO: 9628 - RNA, 21 nt, synthetic construct
  source 1..21: mol_type = other RNA
ggtttaattgtttatattggt

SEQ ID NO: 9629 - RNA, 21 nt, synthetic construct
  source 1..21: mol_type = other RNA
gtaagtcagtattttaatggt

SEQ ID NO: 9630 - RNA, 21 nt, synthetic construct
  source 1..21: mol_type = other RNA
gtagaaaaacaagataatagc

SEQ ID NO: 9631 - RNA, 21 nt, synthetic construct
  source 1..21: mol_type = other RNA
gtctggagaaggtctttgatg

SEQ ID NO: 9632 - RNA, 21 nt, synthetic construct
  source 1..21: mol_type = other RNA
gtctggatatagagagtaggt

SEQ ID NO: 9633 - RNA, 21 nt, synthetic construct
  source 1..21: mol_type = other RNA
gtcttccacggtctggagaag

SEQ ID NO: 9634 - RNA, 21 nt, synthetic construct
  source 1..21: mol_type = other RNA
gtctttgatgctattatcttg

SEQ ID NO: 9635 - RNA, 21 nt, synthetic construct
  source 1..21: mol_type = other RNA
gtggaagaccaatataaacaa

SEQ ID NO: 9636 - RNA, 21 nt, synthetic construct
  source 1..21: mol_type = other RNA
gtttaattgtttatattggtc

SEQ ID NO: 9637 - RNA, 21 nt, synthetic construct
  source 1..21: mol_type = other RNA
gtttatattggtcttccacgg

SEQ ID NO: 9638 - RNA, 21 nt, synthetic construct
  source 1..21: mol_type = other RNA
gtttttctacaaaagtctgga

SEQ ID NO: 9639 - RNA, 21 nt, synthetic construct
  source 1..21: mol_type = other RNA
taaaagaaatagaaaatcagg

SEQ ID NO: 9640 - RNA, 21 nt, synthetic construct
  source 1..21: mol_type = other RNA
taaaatactgacttacctgat

SEQ ID NO: 9641 - RNA, 21 nt, synthetic construct
  source 1..21: mol_type = other RNA
taaacaattaaaccaacagca

SEQ ID NO: 9642 - RNA, 21 nt, synthetic construct
  source 1..21: mol_type = other RNA
taaaccaacagcatagtcaaa

SEQ ID NO: 9643 - RNA, 21 nt, synthetic construct
  source 1..21: mol_type = other RNA
taaccaacctactctctatat

SEQ ID NO: 9644 - RNA, 21 nt, synthetic construct
  source 1..21: mol_type = other RNA
taagtcagtattttaatggta

SEQ ID NO: 9645 - RNA, 21 nt, synthetic construct
  source 1..21: mol_type = other RNA
taatagcatcaaagaccttct

SEQ ID NO: 9646 - RNA, 21 nt, synthetic construct
  source 1..21: mol_type = other RNA
taattgtttatattggtcttc

SEQ ID NO: 9647 - RNA, 21 nt, synthetic construct
  source 1..21: mol_type = other RNA
tacaaaagtctggatatagag

SEQ ID NO: 9648 - RNA, 21 nt, synthetic construct
  source 1..21: mol_type = other RNA
taccattaaaatactgactta

SEQ ID NO: 9649 - RNA, 21 nt, synthetic construct
  source 1..21: mol_type = other RNA
tacctgattttctatttcttt

SEQ ID NO: 9650 - RNA, 21 nt, synthetic construct
  source 1..21: mol_type = other RNA
tactctctatatccagacttt

SEQ ID NO: 9651 - RNA, 21 nt, synthetic construct
  source 1..21: mol_type = other RNA
tactgacttacctgattttct

SEQ ID NO: 9652 - RNA, 21 nt, synthetic construct
  source 1..21: mol_type = other RNA
tagaaaaacaagataatagca

SEQ ID NO: 9653 - RNA, 21 nt, synthetic construct
  source 1..21: mol_type = other RNA
tagaaaatcaggtaagtcagt

SEQ ID NO: 9654 - RNA, 21 nt, synthetic construct
  source 1..21: mol_type = other RNA
tagcatcaaagaccttctcca

SEQ ID NO: 9655 - RNA, 21 nt, synthetic construct
  source 1..21: mol_type = other RNA
tataaacaattaaaccaacag

SEQ ID NO: 9656 - RNA, 21 nt, synthetic construct
  source 1..21: mol_type = other RNA
tataaccaacctactctctat

SEQ ID NO: 9657 - RNA, 21 nt, synthetic construct
  source 1..21: mol_type = other RNA
tatatccagacttttgtagaa

SEQ ID NO: 9658 - RNA, 21 nt, synthetic construct
  source 1..21: mol_type = other RNA
tatattggtcttccacggtct

SEQ ID NO: 9659 - RNA, 21 nt, synthetic construct
  source 1..21: mol_type = other RNA
tatccagacttttgtagaaaa

SEQ ID NO: 9660 - RNA, 21 nt, synthetic construct
  source 1..21: mol_type = other RNA
tatcttgtttttctacaaaag

SEQ ID NO: 9661 - RNA, 21 nt, synthetic construct
  source 1..21: mol_type = other RNA
tatgctgttggtttaattgtt

SEQ ID NO: 9662 - RNA, 21 nt, synthetic construct
  source 1..21: mol_type = other RNA
tattggtcttccacggtctgg

SEQ ID NO: 9663 - RNA, 21 nt, synthetic construct
  source 1..21: mol_type = other RNA
tatttgactatgctgttggtt

SEQ ID NO: 9664 - RNA, 21 nt, synthetic construct
  source 1..21: mol_type = other RNA
tcaaagaccttctccagaccg

SEQ ID NO: 9665 - RNA, 21 nt, synthetic construct
  source 1..21: mol_type = other RNA
tcaggtaagtcagtattttaa

SEQ ID NO: 9666 - RNA, 21 nt, synthetic construct
  source 1..21: mol_type = other RNA
tccacggtctggagaaggtct

SEQ ID NO: 9667 - RNA, 21 nt, synthetic construct
  source 1..21: mol_type = other RNA
tccagaccgtggaagaccaat

SEQ ID NO: 9668 - RNA, 21 nt, synthetic construct
  source 1..21: mol_type = other RNA
tccagacttttgtagaaaaac

SEQ ID NO: 9669 - RNA, 21 nt, synthetic construct
  source 1..21: mol_type = other RNA
tctacaaaagtctggatatag

SEQ ID NO: 9670 - RNA, 21 nt, synthetic construct
  source 1..21: mol_type = other RNA
tctatatccagacttttgtag

SEQ ID NO: 9671 - RNA, 21 nt, synthetic construct
  source 1..21: mol_type = other RNA
tctccagaccgtggaagacca

SEQ ID NO: 9672 - RNA, 21 nt, synthetic construct
  source 1..21: mol_type = other RNA
tctctatatccagacttttgt

SEQ ID NO: 9673 - RNA, 21 nt, synthetic construct
  source 1..21: mol_type = other RNA
tctggagaaggtctttgatgc

SEQ ID NO: 9674 - RNA, 21 nt, synthetic construct
  source 1..21: mol_type = other RNA
tctggatatagagagtaggtt

SEQ ID NO: 9675 - RNA, 21 nt, synthetic construct
  source 1..21: mol_type = other RNA
tcttccacggtctggagaagg

SEQ ID NO: 9676 - RNA, 21 nt, synthetic construct
  source 1..21: mol_type = other RNA
tcttgtttttctacaaaagtc

SEQ ID NO: 9677 - RNA, 21 nt, synthetic construct
  source 1..21: mol_type = other RNA
tctttgatgctattatcttgt

SEQ ID NO: 9678 - RNA, 21 nt, synthetic construct
  source 1..21: mol_type = other RNA
tcttttatttgactatgctgt

SEQ ID NO: 9679 - RNA, 21 nt, synthetic construct
  source 1..21: mol_type = other RNA
tgactatgctgttggtttaat

SEQ ID NO: 9680 - RNA, 21 nt, synthetic construct
  source 1..21: mol_type = other RNA
tgacttacctgattttctatt

SEQ ID NO: 9681 - RNA, 21 nt, synthetic construct
  source 1..21: mol_type = other RNA
tgatgctattatcttgttttt

SEQ ID NO: 9682 - RNA, 21 nt, synthetic construct
  source 1..21: mol_type = other RNA
tgctattatcttgtttttcta

SEQ ID NO: 9683 - RNA, 21 nt, synthetic construct
  source 1..21: mol_type = other RNA
tgctgttggtttaattgttta

SEQ ID NO: 9684 - RNA, 21 nt, synthetic construct
  source 1..21: mol_type = other RNA
tggaagaccaatataaacaat

SEQ ID NO: 9685 - RNA, 21 nt, synthetic construct
  source 1..21: mol_type = other RNA
tggagaaggtctttgatgcta

SEQ ID NO: 9686 - RNA, 21 nt, synthetic construct
  source 1..21: mol_type = other RNA
tggatatagagagtaggttgg

SEQ ID NO: 9687 - RNA, 21 nt, synthetic construct
  source 1..21: mol_type = other RNA
tgggacataccattaaaatac

SEQ ID NO: 9688 - RNA, 21 nt, synthetic construct
  source 1..21: mol_type = other RNA
tggtcttccacggtctggaga

SEQ ID NO: 9689 - RNA, 21 nt, synthetic construct
  source 1..21: mol_type = other RNA
tggtttaattgtttatattgg

SEQ ID NO: 9690 - RNA, 21 nt, synthetic construct
  source 1..21: mol_type = other RNA
tgtagaaaaacaagataatag

SEQ ID NO: 9691 - RNA, 21 nt, synthetic construct
  source 1..21: mol_type = other RNA
tgtttatattggtcttccacg

SEQ ID NO: 9692 - RNA, 21 nt, synthetic construct
  source 1..21: mol_type = other RNA
tgtttttctacaaaagtctgg

SEQ ID NO: 9693 - RNA, 21 nt, synthetic construct
  source 1..21: mol_type = other RNA
ttaaaatactgacttacctga

SEQ ID NO: 9694 - RNA, 21 nt, synthetic construct
  source 1..21: mol_type = other RNA
ttaaaccaacagcatagtcaa

SEQ ID NO: 9695 - RNA, 21 nt, synthetic construct
  source 1..21: mol_type = other RNA
ttacctgattttctatttctt

SEQ ID NO: 9696 - RNA, 21 nt, synthetic construct
  source 1..21: mol_type = other RNA
ttataaccaacctactctcta

SEQ ID NO: 9697 - RNA, 21 nt, synthetic construct
  source 1..21: mol_type = other RNA
ttatattggtcttccacggtc

SEQ ID NO: 9698 - RNA, 21 nt, synthetic construct
  source 1..21: mol_type = other RNA
ttatttgactatgctgttggt

SEQ ID NO: 9699 - RNA, 21 nt, synthetic construct
  source 1..21: mol_type = other RNA
ttccacggtctggagaaggtc

SEQ ID NO: 9700 - RNA, 21 nt, synthetic construct
  source 1..21: mol_type = other RNA
ttctacaaaagtctggatata

SEQ ID NO: 9701 - RNA, 21 nt, synthetic construct
  source 1..21: mol_type = other RNA
ttctccagaccgtggaagacc

SEQ ID NO: 9702 - RNA, 21 nt, synthetic construct
  source 1..21: mol_type = other RNA
ttcttttatttgactatgctg

SEQ ID NO: 9703 - RNA, 21 nt, synthetic construct
  source 1..21: mol_type = other RNA
ttgactatgctgttggtttaa

SEQ ID NO: 9704 - RNA, 21 nt, synthetic construct
  source 1..21: mol_type = other RNA
ttgatgctattatcttgtttt

SEQ ID NO: 9705 - RNA, 21 nt, synthetic construct
  source 1..21: mol_type = other RNA
ttggtcttccacggtctggag

SEQ ID NO: 9706 - RNA, 21 nt, synthetic construct
  source 1..21: mol_type = other RNA
ttgtttatattggtcttccac

SEQ ID NO: 9707 - RNA, 21 nt, synthetic construct
  source 1..21: mol_type = other RNA
ttgtttttctacaaaagtctg

SEQ ID NO: 9708 - RNA, 21 nt, synthetic construct
  source 1..21: mol_type = other RNA
tttatattggtcttccacggt

SEQ ID NO: 9709 - RNA, 21 nt, synthetic construct
  source 1..21: mol_type = other RNA
tttatttgactatgctgttgg

SEQ ID NO: 9710 - RNA, 21 nt, synthetic construct
  source 1..21: mol_type = other RNA
tttctacaaaagtctggatat

SEQ ID NO: 9711 - RNA, 21 nt, synthetic construct
  source 1..21: mol_type = other RNA
tttcttttatttgactatgct

SEQ ID NO: 9712 - RNA, 21 nt, synthetic construct
  source 1..21: mol_type = other RNA
tttgactatgctgttggttta

SEQ ID NO: 9713 - RNA, 21 nt, synthetic construct
  source 1..21: mol_type = other RNA
tttgatgctattatcttgttt

SEQ ID NO: 9714 - RNA, 21 nt, synthetic construct
  source 1..21: mol_type = other RNA
ttttatttgactatgctgttg

SEQ ID NO: 9715 - RNA, 21 nt, synthetic construct
  source 1..21: mol_type = other RNA
ttttctacaaaagtctggata

SEQ ID NO: 9716 - RNA, 21 nt, synthetic construct
  source 1..21: mol_type = other RNA
tttttctacaaaagtctggat

SEQ ID NO: 9717 - RNA, 22 nt, synthetic construct
  source 1..22: mol_type = other RNA
aaaaacaagataatagcatcaa

SEQ ID NO: 9718 - RNA, 22 nt, synthetic construct
  source 1..22: mol_type = other RNA
aaaacaagataatagcatcaaa

SEQ ID NO: 9719 - RNA, 22 nt, synthetic construct
  source 1..22: mol_type = other RNA
aaaagaaatagaaaatcaggta

SEQ ID NO: 9720 - RNA, 22 nt, synthetic construct
  source 1..22: mol_type = other RNA
aaaagtctggatatagagagta

SEQ ID NO: 9721 - RNA, 22 nt, synthetic construct
  source 1..22: mol_type = other RNA
aaaatactgacttacctgattt

SEQ ID NO: 9722 - RNA, 22 nt, synthetic construct
  source 1..22: mol_type = other RNA
aaaatcaggtaagtcagtattt

SEQ ID NO: 9723 - RNA, 22 nt, synthetic construct
  source 1..22: mol_type = other RNA
aaacaagataatagcatcaaag

SEQ ID NO: 9724 - RNA, 22 nt, synthetic construct
  source 1..22: mol_type = other RNA
aaacaattaaaccaacagcata

SEQ ID NO: 9725 - RNA, 22 nt, synthetic construct
  source 1..22: mol_type = other RNA
aaaccaacagcatagtcaaata

SEQ ID NO: 9726 - RNA, 22 nt, synthetic construct
  source 1..22: mol_type = other RNA
aaagaaatagaaaatcaggtaa

SEQ ID NO: 9727 - RNA, 22 nt, synthetic construct
  source 1..22: mol_type = other RNA
aaagaccttctccagaccgtgg

SEQ ID NO: 9728 - RNA, 22 nt, synthetic construct
  source 1..22: mol_type = other RNA
aaagtctggatatagagagtag

SEQ ID NO: 9729 - RNA, 22 nt, synthetic construct
  source 1..22: mol_type = other RNA
aaatactgacttacctgatttt

SEQ ID NO: 9730 - RNA, 22 nt, synthetic construct
  source 1..22: mol_type = other RNA
aaatagaaaatcaggtaagtca

SEQ ID NO: 9731 - RNA, 22 nt, synthetic construct
  source 1..22: mol_type = other RNA
aaatcaggtaagtcagtatttt

SEQ ID NO: 9732 - RNA, 22 nt, synthetic construct
  source 1..22: mol_type = other RNA
aacaagataatagcatcaaaga

SEQ ID NO: 9733 - RNA, 22 nt, synthetic construct
  source 1..22: mol_type = other RNA
aacaattaaaccaacagcatag

SEQ ID NO: 9734 - RNA, 22 nt, synthetic construct
  source 1..22: mol_type = other RNA
aacagcatagtcaaataaaaga

SEQ ID NO: 9735 - RNA, 22 nt, synthetic construct
  source 1..22: mol_type = other RNA
aaccaacagcatagtcaaataa

SEQ ID NO: 9736 - RNA, 22 nt, synthetic construct
  source 1..22: mol_type = other RNA
aaccaacctactctctatatcc

SEQ ID NO: 9737 - RNA, 22 nt, synthetic construct
  source 1..22: mol_type = other RNA
aacctactctctatatccagac

SEQ ID NO: 9738 - RNA, 22 nt, synthetic construct
  source 1..22: mol_type = other RNA
aacttataaccaacctactctc

SEQ ID NO: 9739 - RNA, 22 nt, synthetic construct
  source 1..22: mol_type = other RNA
aagaaatagaaaatcaggtaag

SEQ ID NO: 9740 - RNA, 22 nt, synthetic construct
  source 1..22: mol_type = other RNA
aagaccttctccagaccgtgga

SEQ ID NO: 9741 - RNA, 22 nt, synthetic construct
  source 1..22: mol_type = other RNA
aagataatagcatcaaagacct

SEQ ID NO: 9742 - RNA, 22 nt, synthetic construct
  source 1..22: mol_type = other RNA
aaggtctttgatgctattatct

SEQ ID NO: 9743 - RNA, 22 nt, synthetic construct
  source 1..22: mol_type = other RNA
aagtctggatatagagagtagg

SEQ ID NO: 9744 - RNA, 22 nt, synthetic construct
  source 1..22: mol_type = other RNA
aatactgacttacctgattttc

SEQ ID NO: 9745 - RNA, 22 nt, synthetic construct
  source 1..22: mol_type = other RNA
aatagaaaatcaggtaagtcag

SEQ ID NO: 9746 - RNA, 22 nt, synthetic construct
  source 1..22: mol_type = other RNA
aatagcatcaaagaccttctcc

SEQ ID NO: 9747 - RNA, 22 nt, synthetic construct
  source 1..22: mol_type = other RNA
aatcaggtaagtcagtatttta

SEQ ID NO: 9748 - RNA, 22 nt, synthetic construct
  source 1..22: mol_type = other RNA
aattaaaccaacagcatagtca

SEQ ID NO: 9749 - RNA, 22 nt, synthetic construct
  source 1..22: mol_type = other RNA
aattgtttatattggtcttcca

SEQ ID NO: 9750 - RNA, 22 nt, synthetic construct
  source 1..22: mol_type = other RNA
acaaaagtctggatatagagag

SEQ ID NO: 9751 - RNA, 22 nt, synthetic construct
  source 1..22: mol_type = other RNA
acaagataatagcatcaaagac

SEQ ID NO: 9752 - RNA, 22 nt, synthetic construct
  source 1..22: mol_type = other RNA
acaattaaaccaacagcatagt

SEQ ID NO: 9753 - RNA, 22 nt, synthetic construct
  source 1..22: mol_type = other RNA
acagcatagtcaaataaaagaa

SEQ ID NO: 9754 - RNA, 22 nt, synthetic construct
  source 1..22: mol_type = other RNA
acataccattaaaatactgact

SEQ ID NO: 9755 - RNA, 22 nt, synthetic construct
  source 1..22: mol_type = other RNA
accaacagcatagtcaaataaa

SEQ ID NO: 9756 - RNA, 22 nt, synthetic construct
  source 1..22: mol_type = other RNA
accaacctactctctatatcca

SEQ ID NO: 9757 - RNA, 22 nt, synthetic construct
  source 1..22: mol_type = other RNA
accaatataaacaattaaacca

SEQ ID NO: 9758 - RNA, 22 nt, synthetic construct
  source 1..22: mol_type = other RNA
accattaaaatactgacttacc

SEQ ID NO: 9759 - RNA, 22 nt, synthetic construct
  source 1..22: mol_type = other RNA
accgtggaagaccaatataaac

SEQ ID NO: 9760 - RNA, 22 nt, synthetic construct
  source 1..22: mol_type = other RNA
acctactctctatatccagact

SEQ ID NO: 9761 - RNA, 22 nt, synthetic construct
  source 1..22: mol_type = other RNA
acctgattttctatttctttta

SEQ ID NO: 9762 - RNA, 22 nt, synthetic construct
  source 1..22: mol_type = other RNA
accttctccagaccgtggaaga

SEQ ID NO: 9763 - RNA, 22 nt, synthetic construct
  source 1..22: mol_type = other RNA
acggtctggagaaggtctttga

SEQ ID NO: 9764 - RNA, 22 nt, synthetic construct
  source 1..22: mol_type = other RNA
actatgctgttggtttaattgt

SEQ ID NO: 9765 - RNA, 22 nt, synthetic construct
  source 1..22: mol_type = other RNA
actctctatatccagacttttg

SEQ ID NO: 9766 - RNA, 22 nt, synthetic construct
  source 1..22: mol_type = other RNA
actgacttacctgattttctat

SEQ ID NO: 9767 - RNA, 22 nt, synthetic construct
  source 1..22: mol_type = other RNA
acttacctgattttctatttct

SEQ ID NO: 9768 - RNA, 22 nt, synthetic construct
  source 1..22: mol_type = other RNA
acttataaccaacctactctct

SEQ ID NO: 9769 - RNA, 22 nt, synthetic construct
  source 1..22: mol_type = other RNA
acttttgtagaaaaacaagata

SEQ ID NO: 9770 - RNA, 22 nt, synthetic construct
  source 1..22: mol_type = other RNA
agaaaaacaagataatagcatc

SEQ ID NO: 9771 - RNA, 22 nt, synthetic construct
  source 1..22: mol_type = other RNA
agaaaatcaggtaagtcagtat

SEQ ID NO: 9772 - RNA, 22 nt, synthetic construct
  source 1..22: mol_type = other RNA
agaaatagaaaatcaggtaagt

SEQ ID NO: 9773 - RNA, 22 nt, synthetic construct
  source 1..22: mol_type = other RNA
agaaggtctttgatgctattat

SEQ ID NO: 9774 - RNA, 22 nt, synthetic construct
  source 1..22: mol_type = other RNA
agaccaatataaacaattaaac

SEQ ID NO: 9775 - RNA, 22 nt, synthetic construct
  source 1..22: mol_type = other RNA
agaccgtggaagaccaatataa

SEQ ID NO: 9776 - RNA, 22 nt, synthetic construct
  source 1..22: mol_type = other RNA
agaccttctccagaccgtggaa

SEQ ID NO: 9777 - RNA, 22 nt, synthetic construct
  source 1..22: mol_type = other RNA
agacttttgtagaaaaacaaga

SEQ ID NO: 9778 - RNA, 22 nt, synthetic construct
  source 1..22: mol_type = other RNA
agataatagcatcaaagacctt

SEQ ID NO: 9779 - RNA, 22 nt, synthetic construct
  source 1..22: mol_type = other RNA
agcatagtcaaataaaagaaat

SEQ ID NO: 9780 - RNA, 22 nt, synthetic construct
  source 1..22: mol_type = other RNA
agcatcaaagaccttctccaga

SEQ ID NO: 9781 - RNA, 22 nt, synthetic construct
  source 1..22: mol_type = other RNA
aggtaagtcagtattttaatgg

SEQ ID NO: 9782 - RNA, 22 nt, synthetic construct
  source 1..22: mol_type = other RNA
aggtctttgatgctattatctt

SEQ ID NO: 9783 - RNA, 22 nt, synthetic construct
  source 1..22: mol_type = other RNA
agtctggatatagagagtaggt

SEQ ID NO: 9784 - RNA, 22 nt, synthetic construct
  source 1..22: mol_type = other RNA
ataaaagaaatagaaaatcagg

SEQ ID NO: 9785 - RNA, 22 nt, synthetic construct
  source 1..22: mol_type = other RNA
ataaacaattaaaccaacagca

SEQ ID NO: 9786 - RNA, 22 nt, synthetic construct
  source 1..22: mol_type = other RNA
ataaccaacctactctctatat

SEQ ID NO: 9787 - RNA, 22 nt, synthetic construct
  source 1..22: mol_type = other RNA
ataatagcatcaaagaccttct

SEQ ID NO: 9788 - RNA, 22 nt, synthetic construct
  source 1..22: mol_type = other RNA
ataccattaaaatactgactta

SEQ ID NO: 9789 - RNA, 22 nt, synthetic construct
  source 1..22: mol_type = other RNA
atactgacttacctgattttct

SEQ ID NO: 9790 - RNA, 22 nt, synthetic construct
  source 1..22: mol_type = other RNA
atagaaaatcaggtaagtcagt

SEQ ID NO: 9791 - RNA, 22 nt, synthetic construct
  source 1..22: mol_type = other RNA
atagcatcaaagaccttctcca

SEQ ID NO: 9792 - RNA, 22 nt, synthetic construct
  source 1..22: mol_type = other RNA
atataaacaattaaaccaacag

SEQ ID NO: 9793 - RNA, 22 nt, synthetic construct
  source 1..22: mol_type = other RNA
atatccagacttttgtagaaaa

SEQ ID NO: 9794 - RNA, 22 nt, synthetic construct
  source 1..22: mol_type = other RNA
atattggtcttccacggtctgg

SEQ ID NO: 9795 - RNA, 22 nt, synthetic construct
  source 1..22: mol_type = other RNA
atcaaagaccttctccagaccg

SEQ ID NO: 9796 - RNA, 22 nt, synthetic construct
  source 1..22: mol_type = other RNA
atcaggtaagtcagtattttaa

SEQ ID NO: 9797 - RNA, 22 nt, synthetic construct
  source 1..22: mol_type = other RNA
atccagacttttgtagaaaaac

SEQ ID NO: 9798 - RNA, 22 nt, synthetic construct
  source 1..22: mol_type = other RNA
atcttgtttttctacaaaagtc

SEQ ID NO: 9799 - RNA, 22 nt, synthetic construct
  source 1..22: mol_type = other RNA
atgctattatcttgtttttcta

SEQ ID NO: 9800 - RNA, 22 nt, synthetic construct
  source 1..22: mol_type = other RNA
atgctgttggtttaattgttta

SEQ ID NO: 9801 - RNA, 22 nt, synthetic construct
  source 1..22: mol_type = other RNA
atgggacataccattaaaatac

SEQ ID NO: 9802 - RNA, 22 nt, synthetic construct
  source 1..22: mol_type = other RNA
attaaaatactgacttacctga

SEQ ID NO: 9803 - RNA, 22 nt, synthetic construct
  source 1..22: mol_type = other RNA
attaaaccaacagcatagtcaa

SEQ ID NO: 9804 - RNA, 22 nt, synthetic construct
  source 1..22: mol_type = other RNA
attggtcttccacggtctggag

SEQ ID NO: 9805 - RNA, 22 nt, synthetic construct
  source 1..22: mol_type = other RNA
attgtttatattggtcttccac

SEQ ID NO: 9806 - RNA, 22 nt, synthetic construct
  source 1..22: mol_type = other RNA
atttcttttatttgactatgct

SEQ ID NO: 9807 - RNA, 22 nt, synthetic construct
  source 1..22: mol_type = other RNA
atttgactatgctgttggttta

SEQ ID NO: 9808 - RNA, 22 nt, synthetic construct
  source 1..22: mol_type = other RNA
caaaagtctggatatagagagt

SEQ ID NO: 9809 - RNA, 22 nt, synthetic construct
  source 1..22: mol_type = other RNA
caaagaccttctccagaccgtg

SEQ ID NO: 9810 - RNA, 22 nt, synthetic construct
  source 1..22: mol_type = other RNA
caacagcatagtcaaataaaag

SEQ ID NO: 9811 - RNA, 22 nt, synthetic construct
  source 1..22: mol_type = other RNA
caacctactctctatatccaga

SEQ ID NO: 9812 - RNA, 22 nt, synthetic construct
  source 1..22: mol_type = other RNA
caagataatagcatcaaagacc

SEQ ID NO: 9813 - RNA, 22 nt, synthetic construct
  source 1..22: mol_type = other RNA
caatataaacaattaaaccaac

SEQ ID NO: 9814 - RNA, 22 nt, synthetic construct
  source 1..22: mol_type = other RNA
caattaaaccaacagcatagtc

SEQ ID NO: 9815 - RNA, 22 nt, synthetic construct
  source 1..22: mol_type = other RNA
cacggtctggagaaggtctttg

SEQ ID NO: 9816 - RNA, 22 nt, synthetic construct
  source 1..22: mol_type = other RNA
cagaccgtggaagaccaatata

SEQ ID NO: 9817 - RNA, 22 nt, synthetic construct
  source 1..22: mol_type = other RNA
cagacttttgtagaaaaacaag

SEQ ID NO: 9818 - RNA, 22 nt, synthetic construct
  source 1..22: mol_type = other RNA
cagcatagtcaaataaaagaaa

SEQ ID NO: 9819 - RNA, 22 nt, synthetic construct
  source 1..22: mol_type = other RNA
caggtaagtcagtattttaatg

SEQ ID NO: 9820 - RNA, 22 nt, synthetic construct
  source 1..22: mol_type = other RNA
cataccattaaaatactgactt

SEQ ID NO: 9821 - RNA, 22 nt, synthetic construct
  source 1..22: mol_type = other RNA
catagtcaaataaaagaaatag

SEQ ID NO: 9822 - RNA, 22 nt, synthetic construct
  source 1..22: mol_type = other RNA
catcaaagaccttctccagacc

SEQ ID NO: 9823 - RNA, 22 nt, synthetic construct
  source 1..22: mol_type = other RNA
cattaaaatactgacttacctg

SEQ ID NO: 9824 - RNA, 22 nt, synthetic construct
  source 1..22: mol_type = other RNA
ccaacagcatagtcaaataaaa

SEQ ID NO: 9825 - RNA, 22 nt, synthetic construct
  source 1..22: mol_type = other RNA
ccaacctactctctatatccag

SEQ ID NO: 9826 - RNA, 22 nt, synthetic construct
  source 1..22: mol_type = other RNA
ccaatataaacaattaaaccaa

SEQ ID NO: 9827 - RNA, 22 nt, synthetic construct
  source 1..22: mol_type = other RNA
ccacggtctggagaaggtcttt

SEQ ID NO: 9828 - RNA, 22 nt, synthetic construct
  source 1..22: mol_type = other RNA
ccagaccgtggaagaccaatat

SEQ ID NO: 9829 - RNA, 22 nt, synthetic construct
  source 1..22: mol_type = other RNA
ccagacttttgtagaaaaacaa

SEQ ID NO: 9830 - RNA, 22 nt, synthetic construct
  source 1..22: mol_type = other RNA
ccattaaaatactgacttacct

SEQ ID NO: 9831 - RNA, 22 nt, synthetic construct
  source 1..22: mol_type = other RNA
ccgtggaagaccaatataaaca

SEQ ID NO: 9832 - RNA, 22 nt, synthetic construct
  source 1..22: mol_type = other RNA
cctactctctatatccagactt

SEQ ID NO: 9833 - RNA, 22 nt, synthetic construct
  source 1..22: mol_type = other RNA
cctgattttctatttcttttat

SEQ ID NO: 9834 - RNA, 22 nt, synthetic construct
  source 1..22: mol_type = other RNA
ccttctccagaccgtggaagac

SEQ ID NO: 9835 - RNA, 22 nt, synthetic construct
  source 1..22: mol_type = other RNA
cggtctggagaaggtctttgat

SEQ ID NO: 9836 - RNA, 22 nt, synthetic construct
  source 1..22: mol_type = other RNA
cgtggaagaccaatataaacaa

SEQ ID NO: 9837 - RNA, 22 nt, synthetic construct
  source 1..22: mol_type = other RNA
ctacaaaagtctggatatagag

SEQ ID NO: 9838 - RNA, 22 nt, synthetic construct
  source 1..22: mol_type = other RNA
ctactctctatatccagacttt

SEQ ID NO: 9839 - RNA, 22 nt, synthetic construct
  source 1..22: mol_type = other RNA
ctatatccagacttttgtagaa

SEQ ID NO: 9840 - RNA, 22 nt, synthetic construct
  source 1..22: mol_type = other RNA
ctatgctgttggtttaattgtt

SEQ ID NO: 9841 - RNA, 22 nt, synthetic construct
  source 1..22: mol_type = other RNA
ctattatcttgtttttctacaa

SEQ ID NO: 9842 - RNA, 22 nt, synthetic construct
  source 1..22: mol_type = other RNA
ctatttcttttatttgactatg

SEQ ID NO: 9843 - RNA, 22 nt, synthetic construct
  source 1..22: mol_type = other RNA
ctccagaccgtggaagaccaat

SEQ ID NO: 9844 - RNA, 22 nt, synthetic construct
  source 1..22: mol_type = other RNA
ctctatatccagacttttgtag

SEQ ID NO: 9845 - RNA, 22 nt, synthetic construct
  source 1..22: mol_type = other RNA
ctctctatatccagacttttgt

SEQ ID NO: 9846 - RNA, 22 nt, synthetic construct
  source 1..22: mol_type = other RNA
ctgacttacctgattttctatt

SEQ ID NO: 9847 - RNA, 22 nt, synthetic construct
  source 1..22: mol_type = other RNA
ctggagaaggtctttgatgcta

SEQ ID NO: 9848 - RNA, 22 nt, synthetic construct
  source 1..22: mol_type = other RNA
ctggatatagagagtaggttgg

SEQ ID NO: 9849 - RNA, 22 nt, synthetic construct
  source 1..22: mol_type = other RNA
ctgttggtttaattgtttatat

SEQ ID NO: 9850 - RNA, 22 nt, synthetic construct
  source 1..22: mol_type = other RNA
cttacctgattttctatttctt

SEQ ID NO: 9851 - RNA, 22 nt, synthetic construct
  source 1..22: mol_type = other RNA
cttataaccaacctactctcta

SEQ ID NO: 9852 - RNA, 22 nt, synthetic construct
  source 1..22: mol_type = other RNA
cttccacggtctggagaaggtc

SEQ ID NO: 9853 - RNA, 22 nt, synthetic construct
  source 1..22: mol_type = other RNA
cttctccagaccgtggaagacc

SEQ ID NO: 9854 - RNA, 22 nt, synthetic construct
  source 1..22: mol_type = other RNA
cttgtttttctacaaaagtctg

SEQ ID NO: 9855 - RNA, 22 nt, synthetic construct
  source 1..22: mol_type = other RNA
ctttgatgctattatcttgttt

SEQ ID NO: 9856 - RNA, 22 nt, synthetic construct
  source 1..22: mol_type = other RNA
cttttatttgactatgctgttg

SEQ ID NO: 9857 - RNA, 22 nt, synthetic construct
  source 1..22: mol_type = other RNA
cttttgtagaaaaacaagataa

SEQ ID NO: 9858 - RNA, 22 nt, synthetic construct
  source 1..22: mol_type = other RNA
gaaaaacaagataatagcatca

SEQ ID NO: 9859 - RNA, 22 nt, synthetic construct
  source 1..22: mol_type = other RNA
gaaaatcaggtaagtcagtatt

SEQ ID NO: 9860 - RNA, 22 nt, synthetic construct
  source 1..22: mol_type = other RNA
gaaatagaaaatcaggtaagtc

SEQ ID NO: 9861 - RNA, 22 nt, synthetic construct
  source 1..22: mol_type = other RNA
gaagaccaatataaacaattaa

SEQ ID NO: 9862 - RNA, 22 nt, synthetic construct
  source 1..22: mol_type = other RNA
gaaggtctttgatgctattatc

SEQ ID NO: 9863 - RNA, 22 nt, synthetic construct
  source 1..22: mol_type = other RNA
gacataccattaaaatactgac

SEQ ID NO: 9864 - RNA, 22 nt, synthetic construct
  source 1..22: mol_type = other RNA
gaccaatataaacaattaaacc

SEQ ID NO: 9865 - RNA, 22 nt, synthetic construct
  source 1..22: mol_type = other RNA
gaccgtggaagaccaatataaa

SEQ ID NO: 9866 - RNA, 22 nt, synthetic construct
  source 1..22: mol_type = other RNA
gaccttctccagaccgtggaag

SEQ ID NO: 9867 - RNA, 22 nt, synthetic construct
  source 1..22: mol_type = other RNA
gactatgctgttggtttaattg

SEQ ID NO: 9868 - RNA, 22 nt, synthetic construct
  source 1..22: mol_type = other RNA
gacttacctgattttctatttc

SEQ ID NO: 9869 - RNA, 22 nt, synthetic construct
  source 1..22: mol_type = other RNA
gacttttgtagaaaaacaagat

SEQ ID NO: 9870 - RNA, 22 nt, synthetic construct
  source 1..22: mol_type = other RNA
gagaaggtctttgatgctatta

SEQ ID NO: 9871 - RNA, 22 nt, synthetic construct
  source 1..22: mol_type = other RNA
gataatagcatcaaagaccttc

SEQ ID NO: 9872 - RNA, 22 nt, synthetic construct
  source 1..22: mol_type = other RNA
gatgctattatcttgtttttct

SEQ ID NO: 9873 - RNA, 22 nt, synthetic construct
  source 1..22: mol_type = other RNA
gcatagtcaaataaaagaaata

SEQ ID NO: 9874 - RNA, 22 nt, synthetic construct
  source 1..22: mol_type = other RNA
gcatcaaagaccttctccagac

SEQ ID NO: 9875 - RNA, 22 nt, synthetic construct
  source 1..22: mol_type = other RNA
gctattatcttgtttttctaca

SEQ ID NO: 9876 - RNA, 22 nt, synthetic construct
  source 1..22: mol_type = other RNA
gctgttggtttaattgtttata

SEQ ID NO: 9877 - RNA, 22 nt, synthetic construct
  source 1..22: mol_type = other RNA
ggaagaccaatataaacaatta

SEQ ID NO: 9878 - RNA, 22 nt, synthetic construct
  source 1..22: mol_type = other RNA
ggacataccattaaaatactga

SEQ ID NO: 9879 - RNA, 22 nt, synthetic construct
  source 1..22: mol_type = other RNA
ggagaaggtctttgatgctatt

SEQ ID NO: 9880 - RNA, 22 nt, synthetic construct
  source 1..22: mol_type = other RNA
gggacataccattaaaatactg

SEQ ID NO: 9881 - RNA, 22 nt, synthetic construct
  source 1..22: mol_type = other RNA
ggtaagtcagtattttaatggt

SEQ ID NO: 9882 - RNA, 22 nt, synthetic construct
  source 1..22: mol_type = other RNA
ggtctggagaaggtctttgatg

SEQ ID NO: 9883 - RNA, 22 nt, synthetic construct
  source 1..22: mol_type = other RNA
ggtcttccacggtctggagaag

SEQ ID NO: 9884 - RNA, 22 nt, synthetic construct
  source 1..22: mol_type = other RNA
ggtctttgatgctattatcttg

SEQ ID NO: 9885 - RNA, 22 nt, synthetic construct
  source 1..22: mol_type = other RNA
ggtttaattgtttatattggtc

SEQ ID NO: 9886 - RNA, 22 nt, synthetic construct
  source 1..22: mol_type = other RNA
gtaagtcagtattttaatggta

SEQ ID NO: 9887 - RNA, 22 nt, synthetic construct
  source 1..22: mol_type = other RNA
gtagaaaaacaagataatagca

SEQ ID NO: 9888 - RNA, 22 nt, synthetic construct
  source 1..22: mol_type = other RNA
gtctggagaaggtctttgatgc

SEQ ID NO: 9889 - RNA, 22 nt, synthetic construct
  source 1..22: mol_type = other RNA
gtctggatatagagagtaggtt

SEQ ID NO: 9890 - RNA, 22 nt, synthetic construct
  source 1..22: mol_type = other RNA
gtcttccacggtctggagaagg

SEQ ID NO: 9891 - RNA, 22 nt, synthetic construct
  source 1..22: mol_type = other RNA
gtctttgatgctattatcttgt

SEQ ID NO: 9892 - RNA, 22 nt, synthetic construct
  source 1..22: mol_type = other RNA
gtggaagaccaatataaacaat

SEQ ID NO: 9893 - RNA, 22 nt, synthetic construct
  source 1..22: mol_type = other RNA
gttggtttaattgtttatattg

SEQ ID NO: 9894 - RNA, 22 nt, synthetic construct
  source 1..22: mol_type = other RNA
gtttaattgtttatattggtct

SEQ ID NO: 9895 - RNA, 22 nt, synthetic construct
  source 1..22: mol_type = other RNA
gtttatattggtcttccacggt

SEQ ID NO: 9896 - RNA, 22 nt, synthetic construct
  source 1..22: mol_type = other RNA
gtttttctacaaaagtctggat

SEQ ID NO: 9897 - RNA, 22 nt, synthetic construct
  source 1..22: mol_type = other RNA
taaaagaaatagaaaatcaggt

SEQ ID NO: 9898 - RNA, 22 nt, synthetic construct
  source 1..22: mol_type = other RNA
taaaatactgacttacctgatt

SEQ ID NO: 9899 - RNA, 22 nt, synthetic construct
  source 1..22: mol_type = other RNA
taaacaattaaaccaacagcat

SEQ ID NO: 9900 - RNA, 22 nt, synthetic construct
  source 1..22: mol_type = other RNA
taaaccaacagcatagtcaaat

SEQ ID NO: 9901 - RNA, 22 nt, synthetic construct
  source 1..22: mol_type = other RNA
taaccaacctactctctatatc

SEQ ID NO: 9902 - RNA, 22 nt, synthetic construct
  source 1..22: mol_type = other RNA
taatagcatcaaagaccttctc

SEQ ID NO: 9903 - RNA, 22 nt, synthetic construct
  source 1..22: mol_type = other RNA
taattgtttatattggtcttcc

SEQ ID NO: 9904 - RNA, 22 nt, synthetic construct
  source 1..22: mol_type = other RNA
tacaaaagtctggatatagaga

SEQ ID NO: 9905 - RNA, 22 nt, synthetic construct
  source 1..22: mol_type = other RNA
taccattaaaatactgacttac

SEQ ID NO: 9906 - RNA, 22 nt, synthetic construct
  source 1..22: mol_type = other RNA
tacctgattttctatttctttt

SEQ ID NO: 9907 - RNA, 22 nt, synthetic construct
  source 1..22: mol_type = other RNA
tactctctatatccagactttt

SEQ ID NO: 9908 - RNA, 22 nt, synthetic construct
  source 1..22: mol_type = other RNA
tactgacttacctgattttcta

SEQ ID NO: 9909 - RNA, 22 nt, synthetic construct
  source 1..22: mol_type = other RNA
tagaaaaacaagataatagcat

SEQ ID NO: 9910 - RNA, 22 nt, synthetic construct
  source 1..22: mol_type = other RNA
tagaaaatcaggtaagtcagta

SEQ ID NO: 9911 - RNA, 22 nt, synthetic construct
  source 1..22: mol_type = other RNA
tagcatcaaagaccttctccag

SEQ ID NO: 9912 - RNA, 22 nt, synthetic construct
  source 1..22: mol_type = other RNA
tataaacaattaaaccaacagc

SEQ ID NO: 9913 - RNA, 22 nt, synthetic construct
  source 1..22: mol_type = other RNA
tataaccaacctactctctata

SEQ ID NO: 9914 - RNA, 22 nt, synthetic construct
  source 1..22: mol_type = other RNA
tatatccagacttttgtagaaa

SEQ ID NO: 9915 - RNA, 22 nt, synthetic construct
  source 1..22: mol_type = other RNA
tatattggtcttccacggtctg

SEQ ID NO: 9916 - RNA, 22 nt, synthetic construct
  source 1..22: mol_type = other RNA
tatccagacttttgtagaaaaa

SEQ ID NO: 9917 - RNA, 22 nt, synthetic construct
  source 1..22: mol_type = other RNA
tatcttgtttttctacaaaagt

SEQ ID NO: 9918 - RNA, 22 nt, synthetic construct
  source 1..22: mol_type = other RNA
tatgctgttggtttaattgttt

SEQ ID NO: 9919 - RNA, 22 nt, synthetic construct
  source 1..22: mol_type = other RNA
tattggtcttccacggtctgga

SEQ ID NO: 9920 - RNA, 22 nt, synthetic construct
  source 1..22: mol_type = other RNA
tatttcttttatttgactatgc

SEQ ID NO: 9921 - RNA, 22 nt, synthetic construct
  source 1..22: mol_type = other RNA
tatttgactatgctgttggttt

SEQ ID NO: 9922 - RNA, 22 nt, synthetic construct
  source 1..22: mol_type = other RNA
tcaaagaccttctccagaccgt

SEQ ID NO: 9923 - RNA, 22 nt, synthetic construct
  source 1..22: mol_type = other RNA
tcaggtaagtcagtattttaat

SEQ ID NO: 9924 - RNA, 22 nt, synthetic construct
  source 1..22: mol_type = other RNA
tccacggtctggagaaggtctt

SEQ ID NO: 9925 - RNA, 22 nt, synthetic construct
  source 1..22: mol_type = other RNA
tccagaccgtggaagaccaata

SEQ ID NO: 9926 - RNA, 22 nt, synthetic construct
  source 1..22: mol_type = other RNA
tccagacttttgtagaaaaaca

SEQ ID NO: 9927 - RNA, 22 nt, synthetic construct
  source 1..22: mol_type = other RNA
tctacaaaagtctggatataga

SEQ ID NO: 9928 - RNA, 22 nt, synthetic construct
  source 1..22: mol_type = other RNA
tctatatccagacttttgtaga

SEQ ID NO: 9929 - RNA, 22 nt, synthetic construct
  source 1..22: mol_type = other RNA
tctccagaccgtggaagaccaa

SEQ ID NO: 9930 - RNA, 22 nt, synthetic construct
  source 1..22: mol_type = other RNA
tctctatatccagacttttgta

SEQ ID NO: 9931 - RNA, 22 nt, synthetic construct
  source 1..22: mol_type = other RNA
tctggagaaggtctttgatgct

SEQ ID NO: 9932 - RNA, 22 nt, synthetic construct
  source 1..22: mol_type = other RNA
tctggatatagagagtaggttg

SEQ ID NO: 9933 - RNA, 22 nt, synthetic construct
  source 1..22: mol_type = other RNA
tcttccacggtctggagaaggt

SEQ ID NO: 9934 - RNA, 22 nt, synthetic construct
  source 1..22: mol_type = other RNA
tcttgtttttctacaaaagtct

SEQ ID NO: 9935 - RNA, 22 nt, synthetic construct
  source 1..22: mol_type = other RNA
tctttgatgctattatcttgtt

SEQ ID NO: 9936 - RNA, 22 nt, synthetic construct
  source 1..22: mol_type = other RNA
tcttttatttgactatgctgtt

SEQ ID NO: 9937 - RNA, 22 nt, synthetic construct
  source 1..22: mol_type = other RNA
tgactatgctgttggtttaatt

SEQ ID NO: 9938 - RNA, 22 nt, synthetic construct
  source 1..22: mol_type = other RNA
tgacttacctgattttctattt

SEQ ID NO: 9939 - RNA, 22 nt, synthetic construct
  source 1..22: mol_type = other RNA
tgatgctattatcttgtttttc

SEQ ID NO: 9940 - RNA, 22 nt, synthetic construct
  source 1..22: mol_type = other RNA
tgctattatcttgtttttctac

SEQ ID NO: 9941 - RNA, 22 nt, synthetic construct
  source 1..22: mol_type = other RNA
tgctgttggtttaattgtttat

SEQ ID NO: 9942 - RNA, 22 nt, synthetic construct
  source 1..22: mol_type = other RNA
tggaagaccaatataaacaatt

SEQ ID NO: 9943 - RNA, 22 nt, synthetic construct
  source 1..22: mol_type = other RNA
tggagaaggtctttgatgctat

SEQ ID NO: 9944 - RNA, 22 nt, synthetic construct
  source 1..22: mol_type = other RNA
tggatatagagagtaggttggt

SEQ ID NO: 9945 - RNA, 22 nt, synthetic construct
  source 1..22: mol_type = other RNA
tgggacataccattaaaatact

SEQ ID NO: 9946 - RNA, 22 nt, synthetic construct
  source 1..22: mol_type = other RNA
tggtcttccacggtctggagaa

SEQ ID NO: 9947 - RNA, 22 nt, synthetic construct
  source 1..22: mol_type = other RNA
tggtttaattgtttatattggt

SEQ ID NO: 9948 - RNA, 22 nt, synthetic construct
  source 1..22: mol_type = other RNA
tgtagaaaaacaagataatagc

SEQ ID NO: 9949 - RNA, 22 nt, synthetic construct
  source 1..22: mol_type = other RNA
tgtttatattggtcttccacgg

SEQ ID NO: 9950 - RNA, 22 nt, synthetic construct
  source 1..22: mol_type = other RNA
tgtttttctacaaaagtctgga

SEQ ID NO: 9951 - RNA, 22 nt, synthetic construct
  source 1..22: mol_type = other RNA
ttaaaatactgacttacctgat

SEQ ID NO: 9952 - RNA, 22 nt, synthetic construct
  source 1..22: mol_type = other RNA
ttaaaccaacagcatagtcaaa

SEQ ID NO: 9953 - RNA, 22 nt, synthetic construct
  source 1..22: mol_type = other RNA
ttaattgtttatattggtcttc

SEQ ID NO: 9954 - RNA, 22 nt, synthetic construct
  source 1..22: mol_type = other RNA
ttacctgattttctatttcttt

SEQ ID NO: 9955 - RNA, 22 nt, synthetic construct
  source 1..22: mol_type = other RNA
ttataaccaacctactctctat

SEQ ID NO: 9956 - RNA, 22 nt, synthetic construct
  source 1..22: mol_type = other RNA
ttatattggtcttccacggtct

SEQ ID NO: 9957 - RNA, 22 nt, synthetic construct
  source 1..22: mol_type = other RNA
ttatcttgtttttctacaaaag

SEQ ID NO: 9958 - RNA, 22 nt, synthetic construct
  source 1..22: mol_type = other RNA
ttatttgactatgctgttggtt

SEQ ID NO: 9959 - RNA, 22 nt, synthetic construct
  source 1..22: mol_type = other RNA
ttccacggtctggagaaggtct

SEQ ID NO: 9960 - RNA, 22 nt, synthetic construct
  source 1..22: mol_type = other RNA
ttctacaaaagtctggatatag

SEQ ID NO: 9961 - RNA, 22 nt, synthetic construct
  source 1..22: mol_type = other RNA
ttctccagaccgtggaagacca

SEQ ID NO: 9962 - RNA, 22 nt, synthetic construct
  source 1..22: mol_type = other RNA
ttcttttatttgactatgctgt

SEQ ID NO: 9963 - RNA, 22 nt, synthetic construct
  source 1..22: mol_type = other RNA
ttgactatgctgttggtttaat

SEQ ID NO: 9964 - RNA, 22 nt, synthetic construct
  source 1..22: mol_type = other RNA
ttgatgctattatcttgttttt

SEQ ID NO: 9965 - RNA, 22 nt, synthetic construct
  source 1..22: mol_type = other RNA
ttggtcttccacggtctggaga

SEQ ID NO: 9966 - RNA, 22 nt, synthetic construct
  source 1..22: mol_type = other RNA
ttggtttaattgtttatattgg

SEQ ID NO: 9967 - RNA, 22 nt, synthetic construct
  source 1..22: mol_type = other RNA
ttgtagaaaaacaagataatag

SEQ ID NO: 9968 - RNA, 22 nt, synthetic construct
  source 1..22: mol_type = other RNA
ttgtttatattggtcttccacg

SEQ ID NO: 9969 - RNA, 22 nt, synthetic construct
  source 1..22: mol_type = other RNA
ttgtttttctacaaaagtctgg

SEQ ID NO: 9970 - RNA, 22 nt, synthetic construct
  source 1..22: mol_type = other RNA
tttatattggtcttccacggtc

SEQ ID NO: 9971 - RNA, 22 nt, synthetic construct
  source 1..22: mol_type = other RNA
tttatttgactatgctgttggt

SEQ ID NO: 9972 - RNA, 22 nt, synthetic construct
  source 1..22: mol_type = other RNA
tttctacaaaagtctggatata

SEQ ID NO: 9973 - RNA, 22 nt, synthetic construct
  source 1..22: mol_type = other RNA
tttcttttatttgactatgctg

SEQ ID NO: 9974 - RNA, 22 nt, synthetic construct
  source 1..22: mol_type = other RNA
tttgactatgctgttggtttaa

SEQ ID NO: 9975 - RNA, 22 nt, synthetic construct
  source 1..22: mol_type = other RNA
tttgatgctattatcttgtttt

SEQ ID NO: 9976 - RNA, 22 nt, synthetic construct
  source 1..22: mol_type = other RNA
ttttatttgactatgctgttgg

SEQ ID NO: 9977 - RNA, 22 nt, synthetic construct
  source 1..22: mol_type = other RNA
ttttctacaaaagtctggatat

SEQ ID NO: 9978 - RNA, 22 nt, synthetic construct
  source 1..22: mol_type = other RNA
tttttctacaaaagtctggata

SEQ ID NO: 9979 - RNA, 20 nt, synthetic construct
  source 1..20: mol_type = other RNA
aaaacatgatggtaagacac

SEQ ID NO: 9980 - RNA, 20 nt, synthetic construct
  source 1..20: mol_type = other RNA
aaacatgatggtaagacact

SEQ ID NO: 9981 - RNA, 20 nt, synthetic construct
  source 1..20: mol_type = other RNA
aaacccaccaaagtgtctta

SEQ ID NO: 9982 - RNA, 20 nt, synthetic construct
  source 1..20: mol_type = other RNA
aaagggagtagttcttggtg

SEQ ID NO: 9983 - RNA, 20 nt, synthetic construct
  source 1..20: mol_type = other RNA
aaagtgtcttaccatcatgt

SEQ ID NO: 9984 - RNA, 20 nt, synthetic construct
  source 1..20: mol_type = other RNA
aaatgtaaaacatgatggta

SEQ ID NO: 9985 - RNA, 20 nt, synthetic construct
  source 1..20: mol_type = other RNA
aaatttctctatcttccaag

SEQ ID NO: 9986 - RNA, 20 nt, synthetic construct
  source 1..20: mol_type = other RNA
aaatttctgtgggttcttga

SEQ ID NO: 9987 - RNA, 20 nt, synthetic construct
  source 1..20: mol_type = other RNA
aacatgatggtaagacactt

SEQ ID NO: 9988 - RNA, 20 nt, synthetic construct
  source 1..20: mol_type = other RNA
aacccacagaaatttctcta

SEQ ID NO: 9989 - RNA, 20 nt, synthetic construct
  source 1..20: mol_type = other RNA
aacccaccaaagtgtcttac

SEQ ID NO: 9990 - RNA, 20 nt, synthetic construct
  source 1..20: mol_type = other RNA
aactactccctttcttcagt

SEQ ID NO: 9991 - RNA, 20 nt, synthetic construct
  source 1..20: mol_type = other RNA
aactgaagaaagggagtagt

SEQ ID NO: 9992 - RNA, 20 nt, synthetic construct
  source 1..20: mol_type = other RNA
aagaaagggagtagttcttg

SEQ ID NO: 9993 - RNA, 20 nt, synthetic construct
  source 1..20: mol_type = other RNA
aagaaatgtaaaacatgatg

SEQ ID NO: 9994 - RNA, 20 nt, synthetic construct
  source 1..20: mol_type = other RNA
aagaacccacagaaatttct

SEQ ID NO: 9995 - RNA, 20 nt, synthetic construct
  source 1..20: mol_type = other RNA
aagaactactccctttcttc

SEQ ID NO: 9996 - RNA, 20 nt, synthetic construct
  source 1..20: mol_type = other RNA
aagaaggaaacccaccaaag

SEQ ID NO: 9997 - RNA, 20 nt, synthetic construct
  source 1..20: mol_type = other RNA
aagacactttggtgggtttc

SEQ ID NO: 9998 - RNA, 20 nt, synthetic construct
  source 1..20: mol_type = other RNA
aagagcaccaagaactactc

SEQ ID NO: 9999 - RNA, 20 nt, synthetic construct
  source 1..20: mol_type = other RNA
aagatagagaaatttctgtg

SEQ ID NO: 10000 - RNA, 20 nt, synthetic construct
  source 1..20: mol_type = other RNA
aagccaagagcaccaagaac

SEQ ID NO: 10001 - RNA, 20 nt, synthetic construct
  source 1..20: mol_type = other RNA
aaggaaacccaccaaagtgt

SEQ ID NO: 10002 - RNA, 20 nt, synthetic construct
  source 1..20: mol_type = other RNA
aaggactagtattcaagaac

SEQ ID NO: 10003 - RNA, 20 nt, synthetic construct
  source 1..20: mol_type = other RNA
aagggagtagttcttggtgc

SEQ ID NO: 10004 - RNA, 20 nt, synthetic construct
  source 1..20: mol_type = other RNA
aagtgtcttaccatcatgtt

SEQ ID NO: 10005 - RNA, 20 nt, synthetic construct
  source 1..20: mol_type = other RNA
aataagaaatgtaaaacatg

SEQ ID NO: 10006 - RNA, 20 nt, synthetic construct
  source 1..20: mol_type = other RNA
aatactagtccttctgagct

SEQ ID NO: 10007 - RNA, 20 nt, synthetic construct
  source 1..20: mol_type = other RNA
aatgtaaaacatgatggtaa

SEQ ID NO: 10008 - RNA, 20 nt, synthetic construct
  source 1..20: mol_type = other RNA
aatttctctatcttccaagc

SEQ ID NO: 10009 - RNA, 20 nt, synthetic construct
  source 1..20: mol_type = other RNA
aatttctgtgggttcttgaa

SEQ ID NO: 10010 - RNA, 20 nt, synthetic construct
  source 1..20: mol_type = other RNA
acagaaatttctctatcttc

SEQ ID NO: 10011 - RNA, 20 nt, synthetic construct
  source 1..20: mol_type = other RNA
acatgatggtaagacacttt

SEQ ID NO: 10012 - RNA, 20 nt, synthetic construct
  source 1..20: mol_type = other RNA
acatttcttatttcattcaa

SEQ ID NO: 10013 - RNA, 20 nt, synthetic construct
  source 1..20: mol_type = other RNA
accaaagtgtcttaccatca

SEQ ID NO: 10014 - RNA, 20 nt, synthetic construct
  source 1..20: mol_type = other RNA
accaagaactactccctttc

SEQ ID NO: 10015 - RNA, 20 nt, synthetic construct
  source 1..20: mol_type = other RNA
accatcatgttttacatttc

SEQ ID NO: 10016 - RNA, 20 nt, synthetic construct
  source 1..20: mol_type = other RNA
acccacagaaatttctctat

SEQ ID NO: 10017 - RNA, 20 nt, synthetic construct
  source 1..20: mol_type = other RNA
acccaccaaagtgtcttacc

SEQ ID NO: 10018 - RNA, 20 nt, synthetic construct
  source 1..20: mol_type = other RNA
actactccctttcttcagtt

SEQ ID NO: 10019 - RNA, 20 nt, synthetic construct
  source 1..20: mol_type = other RNA
actagtattcaagaacccac

SEQ ID NO: 10020 - RNA, 20 nt, synthetic construct
  source 1..20: mol_type = other RNA
actagtccttctgagctgat

SEQ ID NO: 10021 - RNA, 20 nt, synthetic construct
  source 1..20: mol_type = other RNA
actccctttcttcagttgaa

SEQ ID NO: 10022 - RNA, 20 nt, synthetic construct
  source 1..20: mol_type = other RNA
actgaagaaagggagtagtt

SEQ ID NO: 10023 - RNA, 20 nt, synthetic construct
  source 1..20: mol_type = other RNA
agaaagggagtagttcttgg

SEQ ID NO: 10024 - RNA, 20 nt, synthetic construct
  source 1..20: mol_type = other RNA
agaaatgtaaaacatgatgg

SEQ ID NO: 10025 - RNA, 20 nt, synthetic construct
  source 1..20: mol_type = other RNA
agaaatttctctatcttcca

SEQ ID NO: 10026 - RNA, 20 nt, synthetic construct
  source 1..20: mol_type = other RNA
agaaatttctgtgggttctt

SEQ ID NO: 10027 - RNA, 20 nt, synthetic construct
  source 1..20: mol_type = other RNA
agaacccacagaaatttctc

SEQ ID NO: 10028 - RNA, 20 nt, synthetic construct
  source 1..20: mol_type = other RNA
agaactactccctttcttca

SEQ ID NO: 10029 - RNA, 20 nt, synthetic construct
  source 1..20: mol_type = other RNA
agaaggaaacccaccaaagt

SEQ ID NO: 10030 - RNA, 20 nt, synthetic construct
  source 1..20: mol_type = other RNA
agaaggactagtattcaaga

SEQ ID NO: 10031 - RNA, 20 nt, synthetic construct
  source 1..20: mol_type = other RNA
agagaaatttctgtgggttc

SEQ ID NO: 10032 - RNA, 20 nt, synthetic construct
  source 1..20: mol_type = other RNA
agagcaccaagaactactcc

SEQ ID NO: 10033 - RNA, 20 nt, synthetic construct
  source 1..20: mol_type = other RNA
agatagagaaatttctgtgg

SEQ ID NO: 10034 - RNA, 20 nt, synthetic construct
  source 1..20: mol_type = other RNA
agcaccaagaactactccct

SEQ ID NO: 10035 - RNA, 20 nt, synthetic construct
  source 1..20: mol_type = other RNA
agccaagagcaccaagaact

SEQ ID NO: 10036 - RNA, 20 nt, synthetic construct
  source 1..20: mol_type = other RNA
agctcagaaggactagtatt

SEQ ID NO: 10037 - RNA, 20 nt, synthetic construct
  source 1..20: mol_type = other RNA
agctgataaaagaatataaa

SEQ ID NO: 10038 - RNA, 20 nt, synthetic construct
  source 1..20: mol_type = other RNA
aggaaacccaccaaagtgtc

SEQ ID NO: 10039 - RNA, 20 nt, synthetic construct
  source 1..20: mol_type = other RNA
aggactagtattcaagaacc

SEQ ID NO: 10040 - RNA, 20 nt, synthetic construct
  source 1..20: mol_type = other RNA
agggagtagttcttggtgct

SEQ ID NO: 10041 - RNA, 20 nt, synthetic construct
  source 1..20: mol_type = other RNA
agtagttcttggtgctcttg

SEQ ID NO: 10042 - RNA, 20 nt, synthetic construct
  source 1..20: mol_type = other RNA
agtattcaagaacccacaga

SEQ ID NO: 10043 - RNA, 20 nt, synthetic construct
  source 1..20: mol_type = other RNA
agtccttctgagctgataaa

SEQ ID NO: 10044 - RNA, 20 nt, synthetic construct
  source 1..20: mol_type = other RNA
agtgtcttaccatcatgttt

SEQ ID NO: 10045 - RNA, 20 nt, synthetic construct
  source 1..20: mol_type = other RNA
agttcttggtgctcttggct

SEQ ID NO: 10046 - RNA, 20 nt, synthetic construct
  source 1..20: mol_type = other RNA
agttgaatgaaataagaaat

SEQ ID NO: 10047 - RNA, 20 nt, synthetic construct
  source 1..20: mol_type = other RNA
ataagaaatgtaaaacatga

SEQ ID NO: 10048 - RNA, 20 nt, synthetic construct
  source 1..20: mol_type = other RNA
atactagtccttctgagctg

SEQ ID NO: 10049 - RNA, 20 nt, synthetic construct
  source 1..20: mol_type = other RNA
atagagaaatttctgtgggt

SEQ ID NO: 10050 - RNA, 20 nt, synthetic construct
  source 1..20: mol_type = other RNA
atattcttttatcagctcag

SEQ ID NO: 10051 - RNA, 20 nt, synthetic construct
  source 1..20: mol_type = other RNA
atcagctcagaaggactagt

SEQ ID NO: 10052 - RNA, 20 nt, synthetic construct
  source 1..20: mol_type = other RNA
atcatgttttacatttctta

SEQ ID NO: 10053 - RNA, 20 nt, synthetic construct
  source 1..20: mol_type = other RNA
atcttccaagccaagagcac

SEQ ID NO: 10054 - RNA, 20 nt, synthetic construct
  source 1..20: mol_type = other RNA
atgatggtaagacactttgg

SEQ ID NO: 10055 - RNA, 20 nt, synthetic construct
  source 1..20: mol_type = other RNA
atggtaagacactttggtgg

SEQ ID NO: 10056 - RNA, 20 nt, synthetic construct
  source 1..20: mol_type = other RNA
atgtaaaacatgatggtaag

SEQ ID NO: 10057 - RNA, 20 nt, synthetic construct
  source 1..20: mol_type = other RNA
attcaactgaagaaagggag

SEQ ID NO: 10058 - RNA, 20 nt, synthetic construct
  source 1..20: mol_type = other RNA
attcaagaacccacagaaat

SEQ ID NO: 10059 - RNA, 20 nt, synthetic construct
  source 1..20: mol_type = other RNA
attcttttatcagctcagaa

SEQ ID NO: 10060 - RNA, 20 nt, synthetic construct
  source 1..20: mol_type = other RNA
atttatattcttttatcagc

SEQ ID NO: 10061 - RNA, 20 nt, synthetic construct
  source 1..20: mol_type = other RNA
atttcattcaactgaagaaa

SEQ ID NO: 10062 - RNA, 20 nt, synthetic construct
  source 1..20: mol_type = other RNA
atttctctatcttccaagcc

SEQ ID NO: 10063 - RNA, 20 nt, synthetic construct
  source 1..20: mol_type = other RNA
atttctgtgggttcttgaat

SEQ ID NO: 10064 - RNA, 20 nt, synthetic construct
  source 1..20: mol_type = other RNA
atttcttatttcattcaact

SEQ ID NO: 10065 - RNA, 20 nt, synthetic construct
  source 1..20: mol_type = other RNA
caaagtgtcttaccatcatg

SEQ ID NO: 10066 - RNA, 20 nt, synthetic construct
  source 1..20: mol_type = other RNA
caactgaagaaagggagtag

SEQ ID NO: 10067 - RNA, 20 nt, synthetic construct
  source 1..20: mol_type = other RNA
caagaacccacagaaatttc

SEQ ID NO: 10068 - RNA, 20 nt, synthetic construct
  source 1..20: mol_type = other RNA
caagaactactccctttctt

SEQ ID NO: 10069 - RNA, 20 nt, synthetic construct
  source 1..20: mol_type = other RNA
caagaaggaaacccaccaaa

SEQ ID NO: 10070 - RNA, 20 nt, synthetic construct
  source 1..20: mol_type = other RNA
caagagcaccaagaactact

SEQ ID NO: 10071 - RNA, 20 nt, synthetic construct
  source 1..20: mol_type = other RNA
caagccaagagcaccaagaa

SEQ ID NO: 10072 - RNA, 20 nt, synthetic construct
  source 1..20: mol_type = other RNA
cacagaaatttctctatctt

SEQ ID NO: 10073 - RNA, 20 nt, synthetic construct
  source 1..20: mol_type = other RNA
caccaaagtgtcttaccatc

SEQ ID NO: 10074 - RNA, 20 nt, synthetic construct
  source 1..20: mol_type = other RNA
caccaagaactactcccttt

SEQ ID NO: 10075 - RNA, 20 nt, synthetic construct
  source 1..20: mol_type = other RNA
cagaaatttctctatcttcc

SEQ ID NO: 10076 - RNA, 20 nt, synthetic construct
  source 1..20: mol_type = other RNA
cagaaggactagtattcaag

SEQ ID NO: 10077 - RNA, 20 nt, synthetic construct
  source 1..20: mol_type = other RNA
cagatttatattcttttatc

SEQ ID NO: 10078 - RNA, 20 nt, synthetic construct
  source 1..20: mol_type = other RNA
cagctcagaaggactagtat

SEQ ID NO: 10079 - RNA, 20 nt, synthetic construct
  source 1..20: mol_type = other RNA
cagttgaatgaaataagaaa

SEQ ID NO: 10080 - RNA, 20 nt, synthetic construct
  source 1..20: mol_type = other RNA
catcatgttttacatttctt

SEQ ID NO: 10081 - RNA, 20 nt, synthetic construct
  source 1..20: mol_type = other RNA
catgatggtaagacactttg

SEQ ID NO: 10082 - RNA, 20 nt, synthetic construct
  source 1..20: mol_type = other RNA
catgttttacatttcttatt

SEQ ID NO: 10083 - RNA, 20 nt, synthetic construct
  source 1..20: mol_type = other RNA
cattcaactgaagaaaggga

SEQ ID NO: 10084 - RNA, 20 nt, synthetic construct
  source 1..20: mol_type = other RNA
catttcttatttcattcaac

SEQ ID NO: 10085 - RNA, 20 nt, synthetic construct
  source 1..20: mol_type = other RNA
ccaaagtgtcttaccatcat

SEQ ID NO: 10086 - RNA, 20 nt, synthetic construct
  source 1..20: mol_type = other RNA
ccaagaactactccctttct

SEQ ID NO: 10087 - RNA, 20 nt, synthetic construct
  source 1..20: mol_type = other RNA
ccaagagcaccaagaactac

SEQ ID NO: 10088 - RNA, 20 nt, synthetic construct
  source 1..20: mol_type = other RNA
ccaagccaagagcaccaaga

SEQ ID NO: 10089 - RNA, 20 nt, synthetic construct
  source 1..20: mol_type = other RNA
ccacagaaatttctctatct

SEQ ID NO: 10090 - RNA, 20 nt, synthetic construct
  source 1..20: mol_type = other RNA
ccaccaaagtgtcttaccat

SEQ ID NO: 10091 - RNA, 20 nt, synthetic construct
  source 1..20: mol_type = other RNA
ccatcatgttttacatttct

SEQ ID NO: 10092 - RNA, 20 nt, synthetic construct
  source 1..20: mol_type = other RNA
cccacagaaatttctctatc

SEQ ID NO: 10093 - RNA, 20 nt, synthetic construct
  source 1..20: mol_type = other RNA
cccaccaaagtgtcttacca

SEQ ID NO: 10094 - RNA, 20 nt, synthetic construct
  source 1..20: mol_type = other RNA
ccctttcttcagttgaatga

SEQ ID NO: 10095 - RNA, 20 nt, synthetic construct
  source 1..20: mol_type = other RNA
ccttctgagctgataaaaga

SEQ ID NO: 10096 - RNA, 20 nt, synthetic construct
  source 1..20: mol_type = other RNA
cctttcttcagttgaatgaa

SEQ ID NO: 10097 - RNA, 20 nt, synthetic construct
  source 1..20: mol_type = other RNA
ctactccctttcttcagttg

SEQ ID NO: 10098 - RNA, 20 nt, synthetic construct
  source 1..20: mol_type = other RNA
ctagtattcaagaacccaca

SEQ ID NO: 10099 - RNA, 20 nt, synthetic construct
  source 1..20: mol_type = other RNA
ctagtccttctgagctgata

SEQ ID NO: 10100 - RNA, 20 nt, synthetic construct
  source 1..20: mol_type = other RNA
ctatcttccaagccaagagc

SEQ ID NO: 10101 - RNA, 20 nt, synthetic construct
  source 1..20: mol_type = other RNA
ctcagaaggactagtattca

SEQ ID NO: 10102 - RNA, 20 nt, synthetic construct
  source 1..20: mol_type = other RNA
ctccctttcttcagttgaat

SEQ ID NO: 10103 - RNA, 20 nt, synthetic construct
  source 1..20: mol_type = other RNA
ctctatcttccaagccaaga

SEQ ID NO: 10104 - RNA, 20 nt, synthetic construct
  source 1..20: mol_type = other RNA
ctcttggcttggaagataga

SEQ ID NO: 10105 - RNA, 20 nt, synthetic construct
  source 1..20: mol_type = other RNA
ctgaagaaagggagtagttc

SEQ ID NO: 10106 - RNA, 20 nt, synthetic construct
  source 1..20: mol_type = other RNA
ctgagctgataaaagaatat

SEQ ID NO: 10107 - RNA, 20 nt, synthetic construct
  source 1..20: mol_type = other RNA
ctgataaaagaatataaatc

SEQ ID NO: 10108 - RNA, 20 nt, synthetic construct
  source 1..20: mol_type = other RNA
ctgtgggttcttgaatacta

SEQ ID NO: 10109 - RNA, 20 nt, synthetic construct
  source 1..20: mol_type = other RNA
cttaccatcatgttttacat

SEQ ID NO: 10110 - RNA, 20 nt, synthetic construct
  source 1..20: mol_type = other RNA
cttatttcattcaactgaag

SEQ ID NO: 10111 - RNA, 20 nt, synthetic construct
  source 1..20: mol_type = other RNA
cttcagttgaatgaaataag

SEQ ID NO: 10112 - RNA, 20 nt, synthetic construct
  source 1..20: mol_type = other RNA
cttccaagccaagagcacca

SEQ ID NO: 10113 - RNA, 20 nt, synthetic construct
  source 1..20: mol_type = other RNA
cttctgagctgataaaagaa

SEQ ID NO: 10114 - RNA, 20 nt, synthetic construct
  source 1..20: mol_type = other RNA
cttgaatactagtccttctg

SEQ ID NO: 10115 - RNA, 20 nt, synthetic construct
  source 1..20: mol_type = other RNA
cttggaagatagagaaattt

SEQ ID NO: 10116 - RNA, 20 nt, synthetic construct
  source 1..20: mol_type = other RNA
cttggcttggaagatagaga

SEQ ID NO: 10117 - RNA, 20 nt, synthetic construct
  source 1..20: mol_type = other RNA
cttggtgctcttggcttgga

SEQ ID NO: 10118 - RNA, 20 nt, synthetic construct
  source 1..20: mol_type = other RNA
ctttcttcagttgaatgaaa

SEQ ID NO: 10119 - RNA, 20 nt, synthetic construct
  source 1..20: mol_type = other RNA
cttttatcagctcagaagga

SEQ ID NO: 10120 - RNA, 20 nt, synthetic construct
  source 1..20: mol_type = other RNA
gaaacccaccaaagtgtctt

SEQ ID NO: 10121 - RNA, 20 nt, synthetic construct
  source 1..20: mol_type = other RNA
gaaagggagtagttcttggt

SEQ ID NO: 10122 - RNA, 20 nt, synthetic construct
  source 1..20: mol_type = other RNA
gaaataagaaatgtaaaaca

SEQ ID NO: 10123 - RNA, 20 nt, synthetic construct
  source 1..20: mol_type = other RNA
gaaatgtaaaacatgatggt

SEQ ID NO: 10124 - RNA, 20 nt, synthetic construct
  source 1..20: mol_type = other RNA
gaaatttctctatcttccaa

SEQ ID NO: 10125 - RNA, 20 nt, synthetic construct
  source 1..20: mol_type = other RNA
gaaatttctgtgggttcttg

SEQ ID NO: 10126 - RNA, 20 nt, synthetic construct
  source 1..20: mol_type = other RNA
gaacccacagaaatttctct

SEQ ID NO: 10127 - RNA, 20 nt, synthetic construct
  source 1..20: mol_type = other RNA
gaactactccctttcttcag

SEQ ID NO: 10128 - RNA, 20 nt, synthetic construct
  source 1..20: mol_type = other RNA
gaagaaagggagtagttctt

SEQ ID NO: 10129 - RNA, 20 nt, synthetic construct
  source 1..20: mol_type = other RNA
gaagatagagaaatttctgt

SEQ ID NO: 10130 - RNA, 20 nt, synthetic construct
  source 1..20: mol_type = other RNA
gaaggaaacccaccaaagtg

SEQ ID NO: 10131 - RNA, 20 nt, synthetic construct
  source 1..20: mol_type = other RNA
gaaggactagtattcaagaa

SEQ ID NO: 10132 - RNA, 20 nt, synthetic construct
  source 1..20: mol_type = other RNA
gaatactagtccttctgagc

SEQ ID NO: 10133 - RNA, 20 nt, synthetic construct
  source 1..20: mol_type = other RNA
gaatgaaataagaaatgtaa

SEQ ID NO: 10134 - RNA, 20 nt, synthetic construct
  source 1..20: mol_type = other RNA
gactagtattcaagaaccca

SEQ ID NO: 10135 - RNA, 20 nt, synthetic construct
  source 1..20: mol_type = other RNA
gagaaatttctgtgggttct

SEQ ID NO: 10136 - RNA, 20 nt, synthetic construct
  source 1..20: mol_type = other RNA
gagcaccaagaactactccc

SEQ ID NO: 10137 - RNA, 20 nt, synthetic construct
  source 1..20: mol_type = other RNA
gagctgataaaagaatataa

SEQ ID NO: 10138 - RNA, 20 nt, synthetic construct
  source 1..20: mol_type = other RNA
gagtagttcttggtgctctt

SEQ ID NO: 10139 - RNA, 20 nt, synthetic construct
  source 1..20: mol_type = other RNA
gataaaagaatataaatctg

SEQ ID NO: 10140 - RNA, 20 nt, synthetic construct
  source 1..20: mol_type = other RNA
gatagagaaatttctgtggg

SEQ ID NO: 10141 - RNA, 20 nt, synthetic construct
  source 1..20: mol_type = other RNA
gatggtaagacactttggtg

SEQ ID NO: 10142 - RNA, 20 nt, synthetic construct
  source 1..20: mol_type = other RNA
gatttatattcttttatcag

SEQ ID NO: 10143 - RNA, 20 nt, synthetic construct
  source 1..20: mol_type = other RNA
gcaccaagaactactccctt

SEQ ID NO: 10144 - RNA, 20 nt, synthetic construct
  source 1..20: mol_type = other RNA
gccaagagcaccaagaacta

SEQ ID NO: 10145 - RNA, 20 nt, synthetic construct
  source 1..20: mol_type = other RNA
gctcagaaggactagtattc

SEQ ID NO: 10146 - RNA, 20 nt, synthetic construct
  source 1..20: mol_type = other RNA
gctcttggcttggaagatag

SEQ ID NO: 10147 - RNA, 20 nt, synthetic construct
  source 1..20: mol_type = other RNA
gctgataaaagaatataaat

SEQ ID NO: 10148 - RNA, 20 nt, synthetic construct
  source 1..20: mol_type = other RNA
gcttggaagatagagaaatt

SEQ ID NO: 10149 - RNA, 20 nt, synthetic construct
  source 1..20: mol_type = other RNA
ggaaacccaccaaagtgtct

SEQ ID NO: 10150 - RNA, 20 nt, synthetic construct
  source 1..20: mol_type = other RNA
ggaagatagagaaatttctg

SEQ ID NO: 10151 - RNA, 20 nt, synthetic construct
  source 1..20: mol_type = other RNA
ggactagtattcaagaaccc

SEQ ID NO: 10152 - RNA, 20 nt, synthetic construct
  source 1..20: mol_type = other RNA
ggagtagttcttggtgctct

SEQ ID NO: 10153 - RNA, 20 nt, synthetic construct
  source 1..20: mol_type = other RNA
ggcttggaagatagagaaat

SEQ ID NO: 10154 - RNA, 20 nt, synthetic construct
  source 1..20: mol_type = other RNA
gggagtagttcttggtgctc

SEQ ID NO: 10155 - RNA, 20 nt, synthetic construct
  source 1..20: mol_type = other RNA
gggttcttgaatactagtcc

SEQ ID NO: 10156 - RNA, 20 nt, synthetic construct
  source 1..20: mol_type = other RNA
ggtaagacactttggtgggt

SEQ ID NO: 10157 - RNA, 20 nt, synthetic construct
  source 1..20: mol_type = other RNA
ggtgctcttggcttggaaga

SEQ ID NO: 10158 - RNA, 20 nt, synthetic construct
  source 1..20: mol_type = other RNA
ggttcttgaatactagtcct

SEQ ID NO: 10159 - RNA, 20 nt, synthetic construct
  source 1..20: mol_type = other RNA
gtaaaacatgatggtaagac

SEQ ID NO: 10160 - RNA, 20 nt, synthetic construct
  source 1..20: mol_type = other RNA
gtaagacactttggtgggtt

SEQ ID NO: 10161 - RNA, 20 nt, synthetic construct
  source 1..20: mol_type = other RNA
gtagttcttggtgctcttgg

SEQ ID NO: 10162 - RNA, 20 nt, synthetic construct
  source 1..20: mol_type = other RNA
gtattcaagaacccacagaa

SEQ ID NO: 10163 - RNA, 20 nt, synthetic construct
  source 1..20: mol_type = other RNA
gtccttctgagctgataaaa

SEQ ID NO: 10164 - RNA, 20 nt, synthetic construct
  source 1..20: mol_type = other RNA
gtcttaccatcatgttttac

SEQ ID NO: 10165 - RNA, 20 nt, synthetic construct
  source 1..20: mol_type = other RNA
gtgctcttggcttggaagat

SEQ ID NO: 10166 - RNA, 20 nt, synthetic construct
  source 1..20: mol_type = other RNA
gtgggttcttgaatactagt

SEQ ID NO: 10167 - RNA, 20 nt, synthetic construct
  source 1..20: mol_type = other RNA
gtgtcttaccatcatgtttt

SEQ ID NO: 10168 - RNA, 20 nt, synthetic construct
  source 1..20: mol_type = other RNA
gttcttgaatactagtcctt

SEQ ID NO: 10169 - RNA, 20 nt, synthetic construct
  source 1..20: mol_type = other RNA
gttcttggtgctcttggctt

SEQ ID NO: 10170 - RNA, 20 nt, synthetic construct
  source 1..20: mol_type = other RNA
gttgaatgaaataagaaatg

SEQ ID NO: 10171 - RNA, 20 nt, synthetic construct
  source 1..20: mol_type = other RNA
gttttacatttcttatttca

SEQ ID NO: 10172 - RNA, 20 nt, synthetic construct
  source 1..20: mol_type = other RNA
taaaacatgatggtaagaca

SEQ ID NO: 10173 - RNA, 20 nt, synthetic construct
  source 1..20: mol_type = other RNA
taagaaatgtaaaacatgat

SEQ ID NO: 10174 - RNA, 20 nt, synthetic construct
  source 1..20: mol_type = other RNA
taagacactttggtgggttt

SEQ ID NO: 10175 - RNA, 20 nt, synthetic construct
  source 1..20: mol_type = other RNA
tacatttcttatttcattca

SEQ ID NO: 10176 - RNA, 20 nt, synthetic construct
  source 1..20: mol_type = other RNA
taccatcatgttttacattt

SEQ ID NO: 10177 - RNA, 20 nt, synthetic construct
  source 1..20: mol_type = other RNA
tactagtccttctgagctga

SEQ ID NO: 10178 - RNA, 20 nt, synthetic construct
  source 1..20: mol_type = other RNA
tactccctttcttcagttga

SEQ ID NO: 10179 - RNA, 20 nt, synthetic construct
  source 1..20: mol_type = other RNA
tagagaaatttctgtgggtt

SEQ ID NO: 10180 - RNA, 20 nt, synthetic construct
  source 1..20: mol_type = other RNA
tagtattcaagaacccacag

SEQ ID NO: 10181 - RNA, 20 nt, synthetic construct
  source 1..20: mol_type = other RNA
tagtccttctgagctgataa

SEQ ID NO: 10182 - RNA, 20 nt, synthetic construct
  source 1..20: mol_type = other RNA
tagttcttggtgctcttggc

SEQ ID NO: 10183 - RNA, 20 nt, synthetic construct
  source 1..20: mol_type = other RNA
tatattcttttatcagctca

SEQ ID NO: 10184 - RNA, 20 nt, synthetic construct
  source 1..20: mol_type = other RNA
tatcagctcagaaggactag

SEQ ID NO: 10185 - RNA, 20 nt, synthetic construct
  source 1..20: mol_type = other RNA
tatcttccaagccaagagca

SEQ ID NO: 10186 - RNA, 20 nt, synthetic construct
  source 1..20: mol_type = other RNA
tattcaagaacccacagaaa

SEQ ID NO: 10187 - RNA, 20 nt, synthetic construct
  source 1..20: mol_type = other RNA
tattcttttatcagctcaga

SEQ ID NO: 10188 - RNA, 20 nt, synthetic construct
  source 1..20: mol_type = other RNA
tatttcattcaactgaagaa

SEQ ID NO: 10189 - RNA, 20 nt, synthetic construct
  source 1..20: mol_type = other RNA
tcaactgaagaaagggagta

SEQ ID NO: 10190 - RNA, 20 nt, synthetic construct
  source 1..20: mol_type = other RNA
tcaagaacccacagaaattt

SEQ ID NO: 10191 - RNA, 20 nt, synthetic construct
  source 1..20: mol_type = other RNA
tcaagaaggaaacccaccaa

SEQ ID NO: 10192 - RNA, 20 nt, synthetic construct
  source 1..20: mol_type = other RNA
tcagaaggactagtattcaa

SEQ ID NO: 10193 - RNA, 20 nt, synthetic construct
  source 1..20: mol_type = other RNA
tcagctcagaaggactagta

SEQ ID NO: 10194 - RNA, 20 nt, synthetic construct
  source 1..20: mol_type = other RNA
tcagttgaatgaaataagaa

SEQ ID NO: 10195 - RNA, 20 nt, synthetic construct
  source 1..20: mol_type = other RNA
tcatgttttacatttcttat

SEQ ID NO: 10196 - RNA, 20 nt, synthetic construct
  source 1..20: mol_type = other RNA
tcattcaactgaagaaaggg

SEQ ID NO: 10197 - RNA, 20 nt, synthetic construct
  source 1..20: mol_type = other RNA
tccaagccaagagcaccaag

SEQ ID NO: 10198 - RNA, 20 nt, synthetic construct
  source 1..20: mol_type = other RNA
tccctttcttcagttgaatg

SEQ ID NO: 10199 - RNA, 20 nt, synthetic construct
  source 1..20: mol_type = other RNA
tccttctgagctgataaaag

SEQ ID NO: 10200 - RNA, 20 nt, synthetic construct
  source 1..20: mol_type = other RNA
tctatcttccaagccaagag

SEQ ID NO: 10201 - RNA, 20 nt, synthetic construct
  source 1..20: mol_type = other RNA
tctctatcttccaagccaag

SEQ ID NO: 10202 - RNA, 20 nt, synthetic construct
  source 1..20: mol_type = other RNA
tctgagctgataaaagaata

SEQ ID NO: 10203 - RNA, 20 nt, synthetic construct
  source 1..20: mol_type = other RNA
tctgtgggttcttgaatact

SEQ ID NO: 10204 - RNA, 20 nt, synthetic construct
  source 1..20: mol_type = other RNA
tcttaccatcatgttttaca

SEQ ID NO: 10205 - RNA, 20 nt, synthetic construct
  source 1..20: mol_type = other RNA
tcttatttcattcaactgaa

SEQ ID NO: 10206 - RNA, 20 nt, synthetic construct
  source 1..20: mol_type = other RNA
tcttcagttgaatgaaataa

SEQ ID NO: 10207 - RNA, 20 nt, synthetic construct
  source 1..20: mol_type = other RNA
tcttccaagccaagagcacc

SEQ ID NO: 10208 - RNA, 20 nt, synthetic construct
  source 1..20: mol_type = other RNA
tcttgaatactagtccttct

SEQ ID NO: 10209 - RNA, 20 nt, synthetic construct
  source 1..20: mol_type = other RNA
tcttggcttggaagatagag

SEQ ID NO: 10210 - RNA, 20 nt, synthetic construct
  source 1..20: mol_type = other RNA
tcttggtgctcttggcttgg

SEQ ID NO: 10211 - RNA, 20 nt, synthetic construct
  source 1..20: mol_type = other RNA
tcttttatcagctcagaagg

SEQ ID NO: 10212 - RNA, 20 nt, synthetic construct
  source 1..20: mol_type = other RNA
tgaaataagaaatgtaaaac

SEQ ID NO: 10213 - RNA, 20 nt, synthetic construct
  source 1..20: mol_type = other RNA
tgaagaaagggagtagttct

SEQ ID NO: 10214 - RNA, 20 nt, synthetic construct
  source 1..20: mol_type = other RNA
tgaatactagtccttctgag

SEQ ID NO: 10215 - RNA, 20 nt, synthetic construct
  source 1..20: mol_type = other RNA
tgaatgaaataagaaatgta

SEQ ID NO: 10216 - RNA, 20 nt, synthetic construct
  source 1..20: mol_type = other RNA
tgagctgataaaagaatata

SEQ ID NO: 10217 - RNA, 20 nt, synthetic construct
  source 1..20: mol_type = other RNA
tgatggtaagacactttggt

SEQ ID NO: 10218 - RNA, 20 nt, synthetic construct
  source 1..20: mol_type = other RNA
tgctcttggcttggaagata

SEQ ID NO: 10219 - RNA, 20 nt, synthetic construct
  source 1..20: mol_type = other RNA
tggaagatagagaaatttct

SEQ ID NO: 10220 - RNA, 20 nt, synthetic construct
  source 1..20: mol_type = other RNA
tggcttggaagatagagaaa

SEQ ID NO: 10221 - RNA, 20 nt, synthetic construct
  source 1..20: mol_type = other RNA
tgggttcttgaatactagtc

SEQ ID NO: 10222 - RNA, 20 nt, synthetic construct
  source 1..20: mol_type = other RNA
tggtaagacactttggtggg

SEQ ID NO: 10223 - RNA, 20 nt, synthetic construct
  source 1..20: mol_type = other RNA
tggtgctcttggcttggaag

SEQ ID NO: 10224 - RNA, 20 nt, synthetic construct
  source 1..20: mol_type = other RNA
tgtaaaacatgatggtaaga

SEQ ID NO: 10225 - RNA, 20 nt, synthetic construct
  source 1..20: mol_type = other RNA
tgtcttaccatcatgtttta

SEQ ID NO: 10226 - RNA, 20 nt, synthetic construct
  source 1..20: mol_type = other RNA
tgtgggttcttgaatactag

SEQ ID NO: 10227 - RNA, 20 nt, synthetic construct
  source 1..20: mol_type = other RNA
tgttttacatttcttatttc

SEQ ID NO: 10228 - RNA, 20 nt, synthetic construct
  source 1..20: mol_type = other RNA
ttacatttcttatttcattc

SEQ ID NO: 10229 - RNA, 20 nt, synthetic construct
  source 1..20: mol_type = other RNA
ttaccatcatgttttacatt

SEQ ID NO: 10230 - RNA, 20 nt, synthetic construct
  source 1..20: mol_type = other RNA
ttatattcttttatcagctc

SEQ ID NO: 10231 - RNA, 20 nt, synthetic construct
  source 1..20: mol_type = other RNA
ttatcagctcagaaggacta

SEQ ID NO: 10232 - RNA, 20 nt, synthetic construct
  source 1..20: mol_type = other RNA
ttatttcattcaactgaaga

SEQ ID NO: 10233 - RNA, 20 nt, synthetic construct
  source 1..20: mol_type = other RNA
ttcaactgaagaaagggagt

SEQ ID NO: 10234 - RNA, 20 nt, synthetic construct
  source 1..20: mol_type = other RNA
ttcaagaacccacagaaatt

SEQ ID NO: 10235 - RNA, 20 nt, synthetic construct
  source 1..20: mol_type = other RNA
ttcagttgaatgaaataaga

SEQ ID NO: 10236 - RNA, 20 nt, synthetic construct
  source 1..20: mol_type = other RNA
ttcattcaactgaagaaagg

SEQ ID NO: 10237 - RNA, 20 nt, synthetic construct
  source 1..20: mol_type = other RNA
ttccaagccaagagcaccaa

SEQ ID NO: 10238 - RNA, 20 nt, synthetic construct
  source 1..20: mol_type = other RNA
ttctctatcttccaagccaa

SEQ ID NO: 10239 - RNA, 20 nt, synthetic construct
  source 1..20: mol_type = other RNA
ttctgagctgataaaagaat

SEQ ID NO: 10240 - RNA, 20 nt, synthetic construct
  source 1..20: mol_type = other RNA
ttctgtgggttcttgaatac

SEQ ID NO: 10241 - RNA, 20 nt, synthetic construct
  source 1..20: mol_type = other RNA
ttcttatttcattcaactga

SEQ ID NO: 10242 - RNA, 20 nt, synthetic construct
  source 1..20: mol_type = other RNA
ttcttcagttgaatgaaata

SEQ ID NO: 10243 - RNA, 20 nt, synthetic construct
  source 1..20: mol_type = other RNA
ttcttgaatactagtccttc

SEQ ID NO: 10244 - RNA, 20 nt, synthetic construct
  source 1..20: mol_type = other RNA
ttcttggtgctcttggcttg

SEQ ID NO: 10245 - RNA, 20 nt, synthetic construct
  source 1..20: mol_type = other RNA
ttcttttatcagctcagaag

SEQ ID NO: 10246 - RNA, 20 nt, synthetic construct
  source 1..20: mol_type = other RNA
ttgaatactagtccttctga

SEQ ID NO: 10247 - RNA, 20 nt, synthetic construct
  source 1..20: mol_type = other RNA
ttgaatgaaataagaaatgt

SEQ ID NO: 10248 - RNA, 20 nt, synthetic construct
  source 1..20: mol_type = other RNA
ttggaagatagagaaatttc

SEQ ID NO: 10249 - RNA, 20 nt, synthetic construct
  source 1..20: mol_type = other RNA
ttggcttggaagatagagaa

SEQ ID NO: 10250 - RNA, 20 nt, synthetic construct
  source 1..20: mol_type = other RNA
ttggtgctcttggcttggaa

SEQ ID NO: 10251 - RNA, 20 nt, synthetic construct
  source 1..20: mol_type = other RNA
tttatattcttttatcagct

SEQ ID NO: 10252 - RNA, 20 nt, synthetic construct
  source 1..20: mol_type = other RNA
tttatcagctcagaaggact

SEQ ID NO: 10253 - RNA, 20 nt, synthetic construct
  source 1..20: mol_type = other RNA
tttcattcaactgaagaaag

SEQ ID NO: 10254 - RNA, 20 nt, synthetic construct
  source 1..20: mol_type = other RNA
tttctctatcttccaagcca

SEQ ID NO: 10255 - RNA, 20 nt, synthetic construct
  source 1..20: mol_type = other RNA
tttctgtgggttcttgaata

SEQ ID NO: 10256 - RNA, 20 nt, synthetic construct
  source 1..20: mol_type = other RNA
tttcttatttcattcaactg

SEQ ID NO: 10257 - RNA, 20 nt, synthetic construct
  source 1..20: mol_type = other RNA
tttcttcagttgaatgaaat

SEQ ID NO: 10258 - RNA, 20 nt, synthetic construct
  source 1..20: mol_type = other RNA
ttttatcagctcagaaggac

SEQ ID NO: 10259 - RNA, 21 nt, synthetic construct
  source 1..21: mol_type = other RNA
aaaacatgatggtaagacact

SEQ ID NO: 10260 - RNA, 21 nt, synthetic construct
  source 1..21: mol_type = other RNA
aaacatgatggtaagacactt

SEQ ID NO: 10261 - RNA, 21 nt, synthetic construct
  source 1..21: mol_type = other RNA
aaacccaccaaagtgtcttac

SEQ ID NO: 10262 - RNA, 21 nt, synthetic construct
  source 1..21: mol_type = other RNA
aaagggagtagttcttggtgc

SEQ ID NO: 10263 - RNA, 21 nt, synthetic construct
  source 1..21: mol_type = other RNA
aaagtgtcttaccatcatgtt

SEQ ID NO: 10264 - RNA, 21 nt, synthetic construct
  source 1..21: mol_type = other RNA
aaatgtaaaacatgatggtaa

SEQ ID NO: 10265 - RNA, 21 nt, synthetic construct
  source 1..21: mol_type = other RNA
aaatttctctatcttccaagc

SEQ ID NO: 10266 - RNA, 21 nt, synthetic construct
  source 1..21: mol_type = other RNA
aaatttctgtgggttcttgaa

SEQ ID NO: 10267 - RNA, 21 nt, synthetic construct
  source 1..21: mol_type = other RNA
aacatgatggtaagacacttt

SEQ ID NO: 10268 - RNA, 21 nt, synthetic construct
  source 1..21: mol_type = other RNA
aacccacagaaatttctctat

SEQ ID NO: 10269 - RNA, 21 nt, synthetic construct
  source 1..21: mol_type = other RNA
aacccaccaaagtgtcttacc

SEQ ID NO: 10270 - RNA, 21 nt, synthetic construct
  source 1..21: mol_type = other RNA
aactactccctttcttcagtt

SEQ ID NO: 10271 - RNA, 21 nt, synthetic construct
  source 1..21: mol_type = other RNA
aactgaagaaagggagtagtt

SEQ ID NO: 10272 - RNA, 21 nt, synthetic construct
  source 1..21: mol_type = other RNA
aagaaagggagtagttcttgg

SEQ ID NO: 10273 - RNA, 21 nt, synthetic construct
  source 1..21: mol_type = other RNA
aagaaatgtaaaacatgatgg

SEQ ID NO: 10274 - RNA, 21 nt, synthetic construct
  source 1..21: mol_type = other RNA
aagaacccacagaaatttctc

SEQ ID NO: 10275 - RNA, 21 nt, synthetic construct
  source 1..21: mol_type = other RNA
aagaactactccctttcttca

SEQ ID NO: 10276 - RNA, 21 nt, synthetic construct
  source 1..21: mol_type = other RNA
aagaaggaaacccaccaaagt

SEQ ID NO: 10277 - RNA, 21 nt, synthetic construct
  source 1..21: mol_type = other RNA
aagagcaccaagaactactcc

SEQ ID NO: 10278 - RNA, 21 nt, synthetic construct
  source 1..21: mol_type = other RNA
aagatagagaaatttctgtgg

SEQ ID NO: 10279 - RNA, 21 nt, synthetic construct
  source 1..21: mol_type = other RNA
aagccaagagcaccaagaact

SEQ ID NO: 10280 - RNA, 21 nt, synthetic construct
  source 1..21: mol_type = other RNA
aaggaaacccaccaaagtgtc

SEQ ID NO: 10281 - RNA, 21 nt, synthetic construct
  source 1..21: mol_type = other RNA
aaggactagtattcaagaacc

SEQ ID NO: 10282 - RNA, 21 nt, synthetic construct
  source 1..21: mol_type = other RNA
aagggagtagttcttggtgct

SEQ ID NO: 10283 - RNA, 21 nt, synthetic construct
  source 1..21: mol_type = other RNA
aagtgtcttaccatcatgttt

SEQ ID NO: 10284 - RNA, 21 nt, synthetic construct
  source 1..21: mol_type = other RNA
aatactagtccttctgagctg

SEQ ID NO: 10285 - RNA, 21 nt, synthetic construct
  source 1..21: mol_type = other RNA
aatgtaaaacatgatggtaag

SEQ ID NO: 10286 - RNA, 21 nt, synthetic construct
  source 1..21: mol_type = other RNA
aatttctctatcttccaagcc

SEQ ID NO: 10287 - RNA, 21 nt, synthetic construct
  source 1..21: mol_type = other RNA
aatttctgtgggttcttgaat

SEQ ID NO: 10288 - RNA, 21 nt, synthetic construct
  source 1..21: mol_type = other RNA
acagaaatttctctatcttcc

SEQ ID NO: 10289 - RNA, 21 nt, synthetic construct
  source 1..21: mol_type = other RNA
acatgatggtaagacactttg

SEQ ID NO: 10290 - RNA, 21 nt, synthetic construct
  source 1..21: mol_type = other RNA
acatttcttatttcattcaac

SEQ ID NO: 10291 - RNA, 21 nt, synthetic construct
  source 1..21: mol_type = other RNA
accaaagtgtcttaccatcat

SEQ ID NO: 10292 - RNA, 21 nt, synthetic construct
  source 1..21: mol_type = other RNA
accaagaactactccctttct

SEQ ID NO: 10293 - RNA, 21 nt, synthetic construct
  source 1..21: mol_type = other RNA
accatcatgttttacatttct

SEQ ID NO: 10294 - RNA, 21 nt, synthetic construct
  source 1..21: mol_type = other RNA
acccacagaaatttctctatc

SEQ ID NO: 10295 - RNA, 21 nt, synthetic construct
  source 1..21: mol_type = other RNA
acccaccaaagtgtcttacca

SEQ ID NO: 10296 - RNA, 21 nt, synthetic construct
  source 1..21: mol_type = other RNA
actactccctttcttcagttg

SEQ ID NO: 10297 - RNA, 21 nt, synthetic construct
  source 1..21: mol_type = other RNA
actagtattcaagaacccaca

SEQ ID NO: 10298 - RNA, 21 nt, synthetic construct
  source 1..21: mol_type = other RNA
actagtccttctgagctgata

SEQ ID NO: 10299 - RNA, 21 nt, synthetic construct
  source 1..21: mol_type = other RNA
actccctttcttcagttgaat

SEQ ID NO: 10300 - RNA, 21 nt, synthetic construct
  source 1..21: mol_type = other RNA
actgaagaaagggagtagttc

SEQ ID NO: 10301 - RNA, 21 nt, synthetic construct
  source 1..21: mol_type = other RNA
agaaagggagtagttcttggt

SEQ ID NO: 10302 - RNA, 21 nt, synthetic construct
  source 1..21: mol_type = other RNA
agaaatgtaaaacatgatggt

SEQ ID NO: 10303 - RNA, 21 nt, synthetic construct
  source 1..21: mol_type = other RNA
agaaatttctctatcttccaa

SEQ ID NO: 10304 - RNA, 21 nt, synthetic construct
  source 1..21: mol_type = other RNA
agaaatttctgtgggttcttg

SEQ ID NO: 10305 - RNA, 21 nt, synthetic construct
  source 1..21: mol_type = other RNA
agaacccacagaaatttctct

SEQ ID NO: 10306 - RNA, 21 nt, synthetic construct
  source 1..21: mol_type = other RNA
agaactactccctttcttcag

SEQ ID NO: 10307 - RNA, 21 nt, synthetic construct
  source 1..21: mol_type = other RNA
agaaggaaacccaccaaagtg

SEQ ID NO: 10308 - RNA, 21 nt, synthetic construct
  source 1..21: mol_type = other RNA
agaaggactagtattcaagaa

SEQ ID NO: 10309 - RNA, 21 nt, synthetic construct
  source 1..21: mol_type = other RNA
agagaaatttctgtgggttct

SEQ ID NO: 10310 - RNA, 21 nt, synthetic construct
  source 1..21: mol_type = other RNA
agagcaccaagaactactccc

SEQ ID NO: 10311 - RNA, 21 nt, synthetic construct
  source 1..21: mol_type = other RNA
agatagagaaatttctgtggg

SEQ ID NO: 10312 - RNA, 21 nt, synthetic construct
  source 1..21: mol_type = other RNA
agcaccaagaactactccctt

SEQ ID NO: 10313 - RNA, 21 nt, synthetic construct
  source 1..21: mol_type = other RNA
agccaagagcaccaagaacta

SEQ ID NO: 10314 - RNA, 21 nt, synthetic construct
  source 1..21: mol_type = other RNA
agctcagaaggactagtattc

SEQ ID NO: 10315 - RNA, 21 nt, synthetic construct
  source 1..21: mol_type = other RNA
aggaaacccaccaaagtgtct

SEQ ID NO: 10316 - RNA, 21 nt, synthetic construct
  source 1..21: mol_type = other RNA
aggactagtattcaagaaccc

SEQ ID NO: 10317 - RNA, 21 nt, synthetic construct
  source 1..21: mol_type = other RNA
agggagtagttcttggtgctc

SEQ ID NO: 10318 - RNA, 21 nt, synthetic construct
  source 1..21: mol_type = other RNA
agtagttcttggtgctcttgg

SEQ ID NO: 10319 - RNA, 21 nt, synthetic construct
  source 1..21: mol_type = other RNA
agtattcaagaacccacagaa

SEQ ID NO: 10320 - RNA, 21 nt, synthetic construct
  source 1..21: mol_type = other RNA
agtccttctgagctgataaaa

SEQ ID NO: 10321 - RNA, 21 nt, synthetic construct
  source 1..21: mol_type = other RNA
agtgtcttaccatcatgtttt

SEQ ID NO: 10322 - RNA, 21 nt, synthetic construct
  source 1..21: mol_type = other RNA
agttcttggtgctcttggctt

SEQ ID NO: 10323 - RNA, 21 nt, synthetic construct
  source 1..21: mol_type = other RNA
agttgaatgaaataagaaatg

SEQ ID NO: 10324 - RNA, 21 nt, synthetic construct
  source 1..21: mol_type = other RNA
atactagtccttctgagctga

SEQ ID NO: 10325 - RNA, 21 nt, synthetic construct
  source 1..21: mol_type = other RNA
atagagaaatttctgtgggtt

SEQ ID NO: 10326 - RNA, 21 nt, synthetic construct
  source 1..21: mol_type = other RNA
atattcttttatcagctcaga

SEQ ID NO: 10327 - RNA, 21 nt, synthetic construct
  source 1..21: mol_type = other RNA
atcagctcagaaggactagta

SEQ ID NO: 10328 - RNA, 21 nt, synthetic construct
  source 1..21: mol_type = other RNA
atcttccaagccaagagcacc

SEQ ID NO: 10329 - RNA, 21 nt, synthetic construct
  source 1..21: mol_type = other RNA
atgatggtaagacactttggt

SEQ ID NO: 10330 - RNA, 21 nt, synthetic construct
  source 1..21: mol_type = other RNA
atggtaagacactttggtggg

SEQ ID NO: 10331 - RNA, 21 nt, synthetic construct
  source 1..21: mol_type = other RNA
atgtaaaacatgatggtaaga

SEQ ID NO: 10332 - RNA, 21 nt, synthetic construct
  source 1..21: mol_type = other RNA
attcaactgaagaaagggagt

SEQ ID NO: 10333 - RNA, 21 nt, synthetic construct
  source 1..21: mol_type = other RNA
attcaagaacccacagaaatt

SEQ ID NO: 10334 - RNA, 21 nt, synthetic construct
  source 1..21: mol_type = other RNA
attcttttatcagctcagaag

SEQ ID NO: 10335 - RNA, 21 nt, synthetic construct
  source 1..21: mol_type = other RNA
atttcattcaactgaagaaag

SEQ ID NO: 10336 - RNA, 21 nt, synthetic construct
  source 1..21: mol_type = other RNA
atttctctatcttccaagcca

SEQ ID NO: 10337 - RNA, 21 nt, synthetic construct
  source 1..21: mol_type = other RNA
atttctgtgggttcttgaata

SEQ ID NO: 10338 - RNA, 21 nt, synthetic construct
  source 1..21: mol_type = other RNA
atttcttatttcattcaactg

SEQ ID NO: 10339 - RNA, 21 nt, synthetic construct
  source 1..21: mol_type = other RNA
caaagtgtcttaccatcatgt

SEQ ID NO: 10340 - RNA, 21 nt, synthetic construct
  source 1..21: mol_type = other RNA
caactgaagaaagggagtagt

SEQ ID NO: 10341 - RNA, 21 nt, synthetic construct
  source 1..21: mol_type = other RNA
caagaacccacagaaatttct

SEQ ID NO: 10342 - RNA, 21 nt, synthetic construct
  source 1..21: mol_type = other RNA
caagaactactccctttcttc

SEQ ID NO: 10343 - RNA, 21 nt, synthetic construct
  source 1..21: mol_type = other RNA
caagaaggaaacccaccaaag

SEQ ID NO: 10344 - RNA, 21 nt, synthetic construct
  source 1..21: mol_type = other RNA
caagagcaccaagaactactc

SEQ ID NO: 10345 - RNA, 21 nt, synthetic construct
  source 1..21: mol_type = other RNA
caagccaagagcaccaagaac

SEQ ID NO: 10346 - RNA, 21 nt, synthetic construct
  source 1..21: mol_type = other RNA
cacagaaatttctctatcttc

SEQ ID NO: 10347 - RNA, 21 nt, synthetic construct
  source 1..21: mol_type = other RNA
caccaaagtgtcttaccatca

SEQ ID NO: 10348 - RNA, 21 nt, synthetic construct
  source 1..21: mol_type = other RNA
caccaagaactactccctttc

SEQ ID NO: 10349 - RNA, 21 nt, synthetic construct
  source 1..21: mol_type = other RNA
cagaaatttctctatcttcca

SEQ ID NO: 10350 - RNA, 21 nt, synthetic construct
  source 1..21: mol_type = other RNA
cagaaggactagtattcaaga

SEQ ID NO: 10351 - RNA, 21 nt, synthetic construct
  source 1..21: mol_type = other RNA
cagctcagaaggactagtatt

SEQ ID NO: 10352 - RNA, 21 nt, synthetic construct
  source 1..21: mol_type = other RNA
cagttgaatgaaataagaaat

SEQ ID NO: 10353 - RNA, 21 nt, synthetic construct
  source 1..21: mol_type = other RNA
catcatgttttacatttctta

SEQ ID NO: 10354 - RNA, 21 nt, synthetic construct
  source 1..21: mol_type = other RNA
catgatggtaagacactttgg

SEQ ID NO: 10355 - RNA, 21 nt, synthetic construct
  source 1..21: mol_type = other RNA
cattcaactgaagaaagggag

SEQ ID NO: 10356 - RNA, 21 nt, synthetic construct
  source 1..21: mol_type = other RNA
catttcttatttcattcaact

SEQ ID NO: 10357 - RNA, 21 nt, synthetic construct
  source 1..21: mol_type = other RNA
ccaaagtgtcttaccatcatg

SEQ ID NO: 10358 - RNA, 21 nt, synthetic construct
  source 1..21: mol_type = other RNA
ccaagaactactccctttctt

SEQ ID NO: 10359 - RNA, 21 nt, synthetic construct
  source 1..21: mol_type = other RNA
ccaagagcaccaagaactact

SEQ ID NO: 10360 - RNA, 21 nt, synthetic construct
  source 1..21: mol_type = other RNA
ccaagccaagagcaccaagaa

SEQ ID NO: 10361 - RNA, 21 nt, synthetic construct
  source 1..21: mol_type = other RNA
ccacagaaatttctctatctt

SEQ ID NO: 10362 - RNA, 21 nt, synthetic construct
  source 1..21: mol_type = other RNA
ccaccaaagtgtcttaccatc

SEQ ID NO: 10363 - RNA, 21 nt, synthetic construct
  source 1..21: mol_type = other RNA
ccatcatgttttacatttctt

SEQ ID NO: 10364 - RNA, 21 nt, synthetic construct
  source 1..21: mol_type = other RNA
cccacagaaatttctctatct

SEQ ID NO: 10365 - RNA, 21 nt, synthetic construct
  source 1..21: mol_type = other RNA
cccaccaaagtgtcttaccat

SEQ ID NO: 10366 - RNA, 21 nt, synthetic construct
  source 1..21: mol_type = other RNA
ccctttcttcagttgaatgaa

SEQ ID NO: 10367 - RNA, 21 nt, synthetic construct
  source 1..21: mol_type = other RNA
ccttctgagctgataaaagaa

SEQ ID NO: 10368 - RNA, 21 nt, synthetic construct
  source 1..21: mol_type = other RNA
cctttcttcagttgaatgaaa

SEQ ID NO: 10369 - RNA, 21 nt, synthetic construct
  source 1..21: mol_type = other RNA
ctactccctttcttcagttga

SEQ ID NO: 10370 - RNA, 21 nt, synthetic construct
  source 1..21: mol_type = other RNA
ctagtattcaagaacccacag

SEQ ID NO: 10371 - RNA, 21 nt, synthetic construct
  source 1..21: mol_type = other RNA
ctagtccttctgagctgataa

SEQ ID NO: 10372 - RNA, 21 nt, synthetic construct
  source 1..21: mol_type = other RNA
ctatcttccaagccaagagca

SEQ ID NO: 10373 - RNA, 21 nt, synthetic construct
  source 1..21: mol_type = other RNA
ctcagaaggactagtattcaa

SEQ ID NO: 10374 - RNA, 21 nt, synthetic construct
  source 1..21: mol_type = other RNA
ctccctttcttcagttgaatg

SEQ ID NO: 10375 - RNA, 21 nt, synthetic construct
  source 1..21: mol_type = other RNA
ctctatcttccaagccaagag

SEQ ID NO: 10376 - RNA, 21 nt, synthetic construct
  source 1..21: mol_type = other RNA
ctcttggcttggaagatagag

SEQ ID NO: 10377 - RNA, 21 nt, synthetic construct
  source 1..21: mol_type = other RNA
ctgaagaaagggagtagttct

SEQ ID NO: 10378 - RNA, 21 nt, synthetic construct
  source 1..21: mol_type = other RNA
ctgagctgataaaagaatata

SEQ ID NO: 10379 - RNA, 21 nt, synthetic construct
  source 1..21: mol_type = other RNA
ctgtgggttcttgaatactag

SEQ ID NO: 10380 - RNA, 21 nt, synthetic construct
  source 1..21: mol_type = other RNA
cttaccatcatgttttacatt

SEQ ID NO: 10381 - RNA, 21 nt, synthetic construct
  source 1..21: mol_type = other RNA
cttatttcattcaactgaaga

SEQ ID NO: 10382 - RNA, 21 nt, synthetic construct
  source 1..21: mol_type = other RNA
cttcagttgaatgaaataaga

SEQ ID NO: 10383 - RNA, 21 nt, synthetic construct
  source 1..21: mol_type = other RNA
cttccaagccaagagcaccaa

SEQ ID NO: 10384 - RNA, 21 nt, synthetic construct
  source 1..21: mol_type = other RNA
cttctgagctgataaaagaat

SEQ ID NO: 10385 - RNA, 21 nt, synthetic construct
  source 1..21: mol_type = other RNA
cttgaatactagtccttctga

SEQ ID NO: 10386 - RNA, 21 nt, synthetic construct
  source 1..21: mol_type = other RNA
cttggaagatagagaaatttc

SEQ ID NO: 10387 - RNA, 21 nt, synthetic construct
  source 1..21: mol_type = other RNA
cttggcttggaagatagagaa

SEQ ID NO: 10388 - RNA, 21 nt, synthetic construct
  source 1..21: mol_type = other RNA
cttggtgctcttggcttggaa

SEQ ID NO: 10389 - RNA, 21 nt, synthetic construct
  source 1..21: mol_type = other RNA
ctttcttcagttgaatgaaat

SEQ ID NO: 10390 - RNA, 21 nt, synthetic construct
  source 1..21: mol_type = other RNA
cttttatcagctcagaaggac

SEQ ID NO: 10391 - RNA, 21 nt, synthetic construct
  source 1..21: mol_type = other RNA
gaaacccaccaaagtgtctta

SEQ ID NO: 10392 - RNA, 21 nt, synthetic construct
  source 1..21: mol_type = other RNA
gaaagggagtagttcttggtg

SEQ ID NO: 10393 - RNA, 21 nt, synthetic construct
  source 1..21: mol_type = other RNA
gaaatgtaaaacatgatggta

SEQ ID NO: 10394 - RNA, 21 nt, synthetic construct
  source 1..21: mol_type = other RNA
gaaatttctctatcttccaag

SEQ ID NO: 10395 - RNA, 21 nt, synthetic construct
  source 1..21: mol_type = other RNA
gaaatttctgtgggttcttga

SEQ ID NO: 10396 - RNA, 21 nt, synthetic construct
  source 1..21: mol_type = other RNA
gaacccacagaaatttctcta

SEQ ID NO: 10397 - RNA, 21 nt, synthetic construct
  source 1..21: mol_type = other RNA
gaactactccctttcttcagt

SEQ ID NO: 10398 - RNA, 21 nt, synthetic construct
  source 1..21: mol_type = other RNA
gaagaaagggagtagttcttg

SEQ ID NO: 10399 - RNA, 21 nt, synthetic construct
  source 1..21: mol_type = other RNA
gaagatagagaaatttctgtg

SEQ ID NO: 10400 - RNA, 21 nt, synthetic construct
  source 1..21: mol_type = other RNA
gaaggaaacccaccaaagtgt

SEQ ID NO: 10401 - RNA, 21 nt, synthetic construct
  source 1..21: mol_type = other RNA
gaaggactagtattcaagaac

SEQ ID NO: 10402 - RNA, 21 nt, synthetic construct
  source 1..21: mol_type = other RNA
gaatactagtccttctgagct

SEQ ID NO: 10403 - RNA, 21 nt, synthetic construct
  source 1..21: mol_type = other RNA
gactagtattcaagaacccac

SEQ ID NO: 10404 - RNA, 21 nt, synthetic construct
  source 1..21: mol_type = other RNA
gagaaatttctgtgggttctt

SEQ ID NO: 10405 - RNA, 21 nt, synthetic construct
  source 1..21: mol_type = other RNA
gagcaccaagaactactccct

SEQ ID NO: 10406 - RNA, 21 nt, synthetic construct
  source 1..21: mol_type = other RNA
gagctgataaaagaatataaa

SEQ ID NO: 10407 - RNA, 21 nt, synthetic construct
  source 1..21: mol_type = other RNA
gagtagttcttggtgctcttg

SEQ ID NO: 10408 - RNA, 21 nt, synthetic construct
  source 1..21: mol_type = other RNA
gatagagaaatttctgtgggt

SEQ ID NO: 10409 - RNA, 21 nt, synthetic construct
  source 1..21: mol_type = other RNA
gatggtaagacactttggtgg

SEQ ID NO: 10410 - RNA, 21 nt, synthetic construct
  source 1..21: mol_type = other RNA
gatttatattcttttatcagc

SEQ ID NO: 10411 - RNA, 21 nt, synthetic construct
  source 1..21: mol_type = other RNA
gcaccaagaactactcccttt

SEQ ID NO: 10412 - RNA, 21 nt, synthetic construct
  source 1..21: mol_type = other RNA
gccaagagcaccaagaactac

SEQ ID NO: 10413 - RNA, 21 nt, synthetic construct
  source 1..21: mol_type = other RNA
gctcagaaggactagtattca

SEQ ID NO: 10414 - RNA, 21 nt, synthetic construct
  source 1..21: mol_type = other RNA
gctcttggcttggaagataga

SEQ ID NO: 10415 - RNA, 21 nt, synthetic construct
  source 1..21: mol_type = other RNA
gctgataaaagaatataaatc

SEQ ID NO: 10416 - RNA, 21 nt, synthetic construct
  source 1..21: mol_type = other RNA
gcttggaagatagagaaattt

SEQ ID NO: 10417 - RNA, 21 nt, synthetic construct
  source 1..21: mol_type = other RNA
ggaaacccaccaaagtgtctt

SEQ ID NO: 10418 - RNA, 21 nt, synthetic construct
  source 1..21: mol_type = other RNA
ggaagatagagaaatttctgt

SEQ ID NO: 10419 - RNA, 21 nt, synthetic construct
  source 1..21: mol_type = other RNA
ggactagtattcaagaaccca

SEQ ID NO: 10420 - RNA, 21 nt, synthetic construct
  source 1..21: mol_type = other RNA
ggagtagttcttggtgctctt

SEQ ID NO: 10421 - RNA, 21 nt, synthetic construct
  source 1..21: mol_type = other RNA
ggcttggaagatagagaaatt

SEQ ID NO: 10422 - RNA, 21 nt, synthetic construct
  source 1..21: mol_type = other RNA
gggagtagttcttggtgctct

SEQ ID NO: 10423 - RNA, 21 nt, synthetic construct
  source 1..21: mol_type = other RNA
gggttcttgaatactagtcct

SEQ ID NO: 10424 - RNA, 21 nt, synthetic construct
  source 1..21: mol_type = other RNA
ggtaagacactttggtgggtt

SEQ ID NO: 10425 - RNA, 21 nt, synthetic construct
  source 1..21: mol_type = other RNA
ggtgctcttggcttggaagat

SEQ ID NO: 10426 - RNA, 21 nt, synthetic construct
  source 1..21: mol_type = other RNA
ggttcttgaatactagtcctt

SEQ ID NO: 10427 - RNA, 21 nt, synthetic construct
  source 1..21: mol_type = other RNA
gtaaaacatgatggtaagaca

SEQ ID NO: 10428 - RNA, 21 nt, synthetic construct
  source 1..21: mol_type = other RNA
gtaagacactttggtgggttt

SEQ ID NO: 10429 - RNA, 21 nt, synthetic construct
  source 1..21: mol_type = other RNA
gtagttcttggtgctcttggc

SEQ ID NO: 10430 - RNA, 21 nt, synthetic construct
  source 1..21: mol_type = other RNA
gtattcaagaacccacagaaa

SEQ ID NO: 10431 - RNA, 21 nt, synthetic construct
  source 1..21: mol_type = other RNA
gtccttctgagctgataaaag

SEQ ID NO: 10432 - RNA, 21 nt, synthetic construct
  source 1..21: mol_type = other RNA
gtcttaccatcatgttttaca

SEQ ID NO: 10433 - RNA, 21 nt, synthetic construct
  source 1..21: mol_type = other RNA
gtgctcttggcttggaagata

SEQ ID NO: 10434 - RNA, 21 nt, synthetic construct
  source 1..21: mol_type = other RNA
gtgggttcttgaatactagtc

SEQ ID NO: 10435 - RNA, 21 nt, synthetic construct
  source 1..21: mol_type = other RNA
gtgtcttaccatcatgtttta

SEQ ID NO: 10436 - RNA, 21 nt, synthetic construct
  source 1..21: mol_type = other RNA
gttcttgaatactagtccttc

SEQ ID NO: 10437 - RNA, 21 nt, synthetic construct
  source 1..21: mol_type = other RNA
gttcttggtgctcttggcttg

SEQ ID NO: 10438 - RNA, 21 nt, synthetic construct
  source 1..21: mol_type = other RNA
gttgaatgaaataagaaatgt

SEQ ID NO: 10439 - RNA, 21 nt, synthetic construct
  source 1..21: mol_type = other RNA
taaaacatgatggtaagacac

SEQ ID NO: 10440 - RNA, 21 nt, synthetic construct
  source 1..21: mol_type = other RNA
taagaaatgtaaaacatgatg

SEQ ID NO: 10441 - RNA, 21 nt, synthetic construct
  source 1..21: mol_type = other RNA
taagacactttggtgggtttc

SEQ ID NO: 10442 - RNA, 21 nt, synthetic construct
  source 1..21: mol_type = other RNA
taccatcatgttttacatttc

SEQ ID NO: 10443 - RNA, 21 nt, synthetic construct
  source 1..21: mol_type = other RNA
tactagtccttctgagctgat

SEQ ID NO: 10444 - RNA, 21 nt, synthetic construct
  source 1..21: mol_type = other RNA
tactccctttcttcagttgaa

SEQ ID NO: 10445 - RNA, 21 nt, synthetic construct
  source 1..21: mol_type = other RNA
tagagaaatttctgtgggttc

SEQ ID NO: 10446 - RNA, 21 nt, synthetic construct
  source 1..21: mol_type = other RNA
tagtattcaagaacccacaga

SEQ ID NO: 10447 - RNA, 21 nt, synthetic construct
  source 1..21: mol_type = other RNA
tagtccttctgagctgataaa

SEQ ID NO: 10448 - RNA, 21 nt, synthetic construct
  source 1..21: mol_type = other RNA
tagttcttggtgctcttggct

SEQ ID NO: 10449 - RNA, 21 nt, synthetic construct
  source 1..21: mol_type = other RNA
tatattcttttatcagctcag

SEQ ID NO: 10450 - RNA, 21 nt, synthetic construct
  source 1..21: mol_type = other RNA
tatcagctcagaaggactagt

SEQ ID NO: 10451 - RNA, 21 nt, synthetic construct
  source 1..21: mol_type = other RNA
tatcttccaagccaagagcac

SEQ ID NO: 10452 - RNA, 21 nt, synthetic construct
  source 1..21: mol_type = other RNA
tattcaagaacccacagaaat

SEQ ID NO: 10453 - RNA, 21 nt, synthetic construct
  source 1..21: mol_type = other RNA
tattcttttatcagctcagaa

SEQ ID NO: 10454 - RNA, 21 nt, synthetic construct
  source 1..21: mol_type = other RNA
tatttcattcaactgaagaaa

SEQ ID NO: 10455 - RNA, 21 nt, synthetic construct
  source 1..21: mol_type = other RNA
tcaactgaagaaagggagtag

SEQ ID NO: 10456 - RNA, 21 nt, synthetic construct
  source 1..21: mol_type = other RNA
tcaagaacccacagaaatttc

SEQ ID NO: 10457 - RNA, 21 nt, synthetic construct
  source 1..21: mol_type = other RNA
tcaagaaggaaacccaccaaa

SEQ ID NO: 10458 - RNA, 21 nt, synthetic construct
  source 1..21: mol_type = other RNA
tcagaaggactagtattcaag

SEQ ID NO: 10459 - RNA, 21 nt, synthetic construct
  source 1..21: mol_type = other RNA
tcagctcagaaggactagtat

SEQ ID NO: 10460 - RNA, 21 nt, synthetic construct
  source 1..21: mol_type = other RNA
tcagttgaatgaaataagaaa

SEQ ID NO: 10461 - RNA, 21 nt, synthetic construct
  source 1..21: mol_type = other RNA
tcattcaactgaagaaaggga

SEQ ID NO: 10462 - RNA, 21 nt, synthetic construct
  source 1..21: mol_type = other RNA
tccaagccaagagcaccaaga

SEQ ID NO: 10463 - RNA, 21 nt, synthetic construct
  source 1..21: mol_type = other RNA
tccctttcttcagttgaatga

SEQ ID NO: 10464 - RNA, 21 nt, synthetic construct
  source 1..21: mol_type = other RNA
tccttctgagctgataaaaga

SEQ ID NO: 10465 - RNA, 21 nt, synthetic construct
  source 1..21: mol_type = other RNA
tctatcttccaagccaagagc

SEQ ID NO: 10466 - RNA, 21 nt, synthetic construct
  source 1..21: mol_type = other RNA
tctctatcttccaagccaaga

SEQ ID NO: 10467 - RNA, 21 nt, synthetic construct
  source 1..21: mol_type = other RNA
tctgagctgataaaagaatat

SEQ ID NO: 10468 - RNA, 21 nt, synthetic construct
  source 1..21: mol_type = other RNA
tctgtgggttcttgaatacta

SEQ ID NO: 10469 - RNA, 21 nt, synthetic construct
  source 1..21: mol_type = other RNA
tcttaccatcatgttttacat

SEQ ID NO: 10470 - RNA, 21 nt, synthetic construct
  source 1..21: mol_type = other RNA
tcttatttcattcaactgaag

SEQ ID NO: 10471 - RNA, 21 nt, synthetic construct
  source 1..21: mol_type = other RNA
tcttcagttgaatgaaataag

SEQ ID NO: 10472 - RNA, 21 nt, synthetic construct
  source 1..21: mol_type = other RNA
tcttccaagccaagagcacca

SEQ ID NO: 10473 - RNA, 21 nt, synthetic construct
  source 1..21: mol_type = other RNA
tcttgaatactagtccttctg

SEQ ID NO: 10474 - RNA, 21 nt, synthetic construct
  source 1..21: mol_type = other RNA
tcttggcttggaagatagaga

SEQ ID NO: 10475 - RNA, 21 nt, synthetic construct
  source 1..21: mol_type = other RNA
tcttggtgctcttggcttgga

SEQ ID NO: 10476 - RNA, 21 nt, synthetic construct
  source 1..21: mol_type = other RNA
tcttttatcagctcagaagga

SEQ ID NO: 10477 - RNA, 21 nt, synthetic construct
  source 1..21: mol_type = other RNA
tgaagaaagggagtagttctt

SEQ ID NO: 10478 - RNA, 21 nt, synthetic construct
  source 1..21: mol_type = other RNA
tgaatactagtccttctgagc

SEQ ID NO: 10479 - RNA, 21 nt, synthetic construct
  source 1..21: mol_type = other RNA
tgagctgataaaagaatataa

SEQ ID NO: 10480 - RNA, 21 nt, synthetic construct
  source 1..21: mol_type = other RNA
tgatggtaagacactttggtg

SEQ ID NO: 10481 - RNA, 21 nt, synthetic construct
  source 1..21: mol_type = other RNA
tgctcttggcttggaagatag

SEQ ID NO: 10482 - RNA, 21 nt, synthetic construct
  source 1..21: mol_type = other RNA
tggaagatagagaaatttctg

SEQ ID NO: 10483 - RNA, 21 nt, synthetic construct
  source 1..21: mol_type = other RNA
tggcttggaagatagagaaat

SEQ ID NO: 10484 - RNA, 21 nt, synthetic construct
  source 1..21: mol_type = other RNA
tgggttcttgaatactagtcc

SEQ ID NO: 10485 - RNA, 21 nt, synthetic construct
  source 1..21: mol_type = other RNA
tggtaagacactttggtgggt

SEQ ID NO: 10486 - RNA, 21 nt, synthetic construct
  source 1..21: mol_type = other RNA
tggtgctcttggcttggaaga

SEQ ID NO: 10487 - RNA, 21 nt, synthetic construct
  source 1..21: mol_type = other RNA
tgtaaaacatgatggtaagac

SEQ ID NO: 10488 - RNA, 21 nt, synthetic construct
  source 1..21: mol_type = other RNA
tgtcttaccatcatgttttac

SEQ ID NO: 10489 - RNA, 21 nt, synthetic construct
  source 1..21: mol_type = other RNA
tgtgggttcttgaatactagt

SEQ ID NO: 10490 - RNA, 21 nt, synthetic construct
  source 1..21: mol_type = other RNA
ttaccatcatgttttacattt

SEQ ID NO: 10491 - RNA, 21 nt, synthetic construct
  source 1..21: mol_type = other RNA
ttatattcttttatcagctca

SEQ ID NO: 10492 - RNA, 21 nt, synthetic construct
  source 1..21: mol_type = other RNA
ttatcagctcagaaggactag

SEQ ID NO: 10493 - RNA, 21 nt, synthetic construct
  source 1..21: mol_type = other RNA
ttatttcattcaactgaagaa

SEQ ID NO: 10494 - RNA, 21 nt, synthetic construct
  source 1..21: mol_type = other RNA
ttcaactgaagaaagggagta

SEQ ID NO: 10495 - RNA, 21 nt, synthetic construct
  source 1..21: mol_type = other RNA
ttcaagaacccacagaaattt

SEQ ID NO: 10496 - RNA, 21 nt, synthetic construct
  source 1..21: mol_type = other RNA
ttcagttgaatgaaataagaa

SEQ ID NO: 10497 - RNA, 21 nt, synthetic construct
  source 1..21: mol_type = other RNA
ttcattcaactgaagaaaggg

SEQ ID NO: 10498 - RNA, 21 nt, synthetic construct
  source 1..21: mol_type = other RNA
ttccaagccaagagcaccaag

SEQ ID NO: 10499 - RNA, 21 nt, synthetic construct
  source 1..21: mol_type = other RNA
ttctctatcttccaagccaag

SEQ ID NO: 10500 - RNA, 21 nt, synthetic construct
  source 1..21: mol_type = other RNA
ttctgagctgataaaagaata

SEQ ID NO: 10501 - RNA, 21 nt, synthetic construct
  source 1..21: mol_type = other RNA
ttctgtgggttcttgaatact

SEQ ID NO: 10502 - RNA, 21 nt, synthetic construct
  source 1..21: mol_type = other RNA
ttcttatttcattcaactgaa

SEQ ID NO: 10503 - RNA, 21 nt, synthetic construct
  source 1..21: mol_type = other RNA
ttcttcagttgaatgaaataa

SEQ ID NO: 10504 - RNA, 21 nt, synthetic construct
  source 1..21: mol_type = other RNA
ttcttgaatactagtccttct

SEQ ID NO: 10505 - RNA, 21 nt, synthetic construct
  source 1..21: mol_type = other RNA
ttcttggtgctcttggcttgg

SEQ ID NO: 10506 - RNA, 21 nt, synthetic construct
  source 1..21: mol_type = other RNA
ttcttttatcagctcagaagg

SEQ ID NO: 10507 - RNA, 21 nt, synthetic construct
  source 1..21: mol_type = other RNA
ttgaatactagtccttctgag

SEQ ID NO: 10508 - RNA, 21 nt, synthetic construct
  source 1..21: mol_type = other RNA
ttggaagatagagaaatttct

SEQ ID NO: 10509 - RNA, 21 nt, synthetic construct
  source 1..21: mol_type = other RNA
ttggcttggaagatagagaaa

SEQ ID NO: 10510 - RNA, 21 nt, synthetic construct
  source 1..21: mol_type = other RNA
ttggtgctcttggcttggaag

SEQ ID NO: 10511 - RNA, 21 nt, synthetic construct
  source 1..21: mol_type = other RNA
tttatattcttttatcagctc

SEQ ID NO: 10512 - RNA, 21 nt, synthetic construct
  source 1..21: mol_type = other RNA
tttatcagctcagaaggacta

SEQ ID NO: 10513 - RNA, 21 nt, synthetic construct
  source 1..21: mol_type = other RNA
tttcattcaactgaagaaagg

SEQ ID NO: 10514 - RNA, 21 nt, synthetic construct
  source 1..21: mol_type = other RNA
tttctctatcttccaagccaa

SEQ ID NO: 10515 - RNA, 21 nt, synthetic construct
  source 1..21: mol_type = other RNA
tttctgtgggttcttgaatac

SEQ ID NO: 10516 - RNA, 21 nt, synthetic construct
  source 1..21: mol_type = other RNA
tttcttatttcattcaactga

SEQ ID NO: 10517 - RNA, 21 nt, synthetic construct
  source 1..21: mol_type = other RNA
tttcttcagttgaatgaaata

SEQ ID NO: 10518 - RNA, 21 nt, synthetic construct
  source 1..21: mol_type = other RNA
ttttatcagctcagaaggact

SEQ ID NO: 10519 - RNA, 22 nt, synthetic construct
  source 1..22: mol_type = other RNA
aaaacatgatggtaagacactt

SEQ ID NO: 10520 - RNA, 22 nt, synthetic construct
  source 1..22: mol_type = other RNA
aaacatgatggtaagacacttt

SEQ ID NO: 10521 - RNA, 22 nt, synthetic construct
  source 1..22: mol_type = other RNA
aaacccaccaaagtgtcttacc

SEQ ID NO: 10522 - RNA, 22 nt, synthetic construct
  source 1..22: mol_type = other RNA
aaagggagtagttcttggtgct

SEQ ID NO: 10523 - RNA, 22 nt, synthetic construct
  source 1..22: mol_type = other RNA
aaagtgtcttaccatcatgttt

SEQ ID NO: 10524 - RNA, 22 nt, synthetic construct
  source 1..22: mol_type = other RNA
aaatgtaaaacatgatggtaag

SEQ ID NO: 10525 - RNA, 22 nt, synthetic construct
  source 1..22: mol_type = other RNA
aaatttctctatcttccaagcc

SEQ ID NO: 10526 - RNA, 22 nt, synthetic construct
  source 1..22: mol_type = other RNA
aaatttctgtgggttcttgaat

SEQ ID NO: 10527 - RNA, 22 nt, synthetic construct
  source 1..22: mol_type = other RNA
aacatgatggtaagacactttg

SEQ ID NO: 10528 - RNA, 22 nt, synthetic construct
  source 1..22: mol_type = other RNA
aacccacagaaatttctctatc

SEQ ID NO: 10529 - RNA, 22 nt, synthetic construct
  source 1..22: mol_type = other RNA
aacccaccaaagtgtcttacca

SEQ ID NO: 10530 - RNA, 22 nt, synthetic construct
  source 1..22: mol_type = other RNA
aactactccctttcttcagttg

SEQ ID NO: 10531 - RNA, 22 nt, synthetic construct
  source 1..22: mol_type = other RNA
aactgaagaaagggagtagttc

SEQ ID NO: 10532 - RNA, 22 nt, synthetic construct
  source 1..22: mol_type = other RNA
aagaaagggagtagttcttggt

SEQ ID NO: 10533 - RNA, 22 nt, synthetic construct
  source 1..22: mol_type = other RNA
aagaaatgtaaaacatgatggt

SEQ ID NO: 10534 - RNA, 22 nt, synthetic construct
  source 1..22: mol_type = other RNA
aagaacccacagaaatttctct

SEQ ID NO: 10535 - RNA, 22 nt, synthetic construct
  source 1..22: mol_type = other RNA
aagaactactccctttcttcag

SEQ ID NO: 10536 - RNA, 22 nt, synthetic construct
  source 1..22: mol_type = other RNA
aagaaggaaacccaccaaagtg

SEQ ID NO: 10537 - RNA, 22 nt, synthetic construct
  source 1..22: mol_type = other RNA
aagagcaccaagaactactccc

SEQ ID NO: 10538 - RNA, 22 nt, synthetic construct
  source 1..22: mol_type = other RNA
aagatagagaaatttctgtggg

SEQ ID NO: 10539 - RNA, 22 nt, synthetic construct
  source 1..22: mol_type = other RNA
aagccaagagcaccaagaacta

SEQ ID NO: 10540 - RNA, 22 nt, synthetic construct
  source 1..22: mol_type = other RNA
aaggaaacccaccaaagtgtct

SEQ ID NO: 10541 - RNA, 22 nt, synthetic construct
  source 1..22: mol_type = other RNA
aaggactagtattcaagaaccc

SEQ ID NO: 10542 - RNA, 22 nt, synthetic construct
  source 1..22: mol_type = other RNA
aagggagtagttcttggtgctc

SEQ ID NO: 10543 - RNA, 22 nt, synthetic construct
  source 1..22: mol_type = other RNA
aagtgtcttaccatcatgtttt

SEQ ID NO: 10544 - RNA, 22 nt, synthetic construct
  source 1..22: mol_type = other RNA
aatactagtccttctgagctga

SEQ ID NO: 10545 - RNA, 22 nt, synthetic construct
  source 1..22: mol_type = other RNA
aatgtaaaacatgatggtaaga

SEQ ID NO: 10546 - RNA, 22 nt, synthetic construct
  source 1..22: mol_type = other RNA
aatttctctatcttccaagcca

SEQ ID NO: 10547 - RNA, 22 nt, synthetic construct
  source 1..22: mol_type = other RNA
aatttctgtgggttcttgaata

SEQ ID NO: 10548 - RNA, 22 nt, synthetic construct
  source 1..22: mol_type = other RNA
acagaaatttctctatcttcca

SEQ ID NO: 10549 - RNA, 22 nt, synthetic construct
  source 1..22: mol_type = other RNA
acatgatggtaagacactttgg

SEQ ID NO: 10550 - RNA, 22 nt, synthetic construct
  source 1..22: mol_type = other RNA
acatttcttatttcattcaact

SEQ ID NO: 10551 - RNA, 22 nt, synthetic construct
  source 1..22: mol_type = other RNA
accaaagtgtcttaccatcatg

SEQ ID NO: 10552 - RNA, 22 nt, synthetic construct
  source 1..22: mol_type = other RNA
accaagaactactccctttctt

SEQ ID NO: 10553 - RNA, 22 nt, synthetic construct
  source 1..22: mol_type = other RNA
accatcatgttttacatttctt

SEQ ID NO: 10554 - RNA, 22 nt, synthetic construct
  source 1..22: mol_type = other RNA
acccacagaaatttctctatct

SEQ ID NO: 10555 - RNA, 22 nt, synthetic construct
  source 1..22: mol_type = other RNA
acccaccaaagtgtcttaccat

SEQ ID NO: 10556 - RNA, 22 nt, synthetic construct
  source 1..22: mol_type = other RNA
actactccctttcttcagttga

SEQ ID NO: 10557 - RNA, 22 nt, synthetic construct
  source 1..22: mol_type = other RNA
actagtattcaagaacccacag

SEQ ID NO: 10558 - RNA, 22 nt, synthetic construct
  source 1..22: mol_type = other RNA
actagtccttctgagctgataa

SEQ ID NO: 10559 - RNA, 22 nt, synthetic construct
  source 1..22: mol_type = other RNA
actccctttcttcagttgaatg

SEQ ID NO: 10560 - RNA, 22 nt, synthetic construct
  source 1..22: mol_type = other RNA
actgaagaaagggagtagttct

SEQ ID NO: 10561 - RNA, 22 nt, synthetic construct
  source 1..22: mol_type = other RNA
agaaagggagtagttcttggtg

SEQ ID NO: 10562 - RNA, 22 nt, synthetic construct
  source 1..22: mol_type = other RNA
agaaatgtaaaacatgatggta

SEQ ID NO: 10563 - RNA, 22 nt, synthetic construct
  source 1..22: mol_type = other RNA
agaaatttctctatcttccaag

SEQ ID NO: 10564 - RNA, 22 nt, synthetic construct
  source 1..22: mol_type = other RNA
agaaatttctgtgggttcttga

SEQ ID NO: 10565 - RNA, 22 nt, synthetic construct
  source 1..22: mol_type = other RNA
agaacccacagaaatttctcta

SEQ ID NO: 10566 - RNA, 22 nt, synthetic construct
  source 1..22: mol_type = other RNA
agaactactccctttcttcagt

SEQ ID NO: 10567 - RNA, 22 nt, synthetic construct
  source 1..22: mol_type = other RNA
agaaggaaacccaccaaagtgt

SEQ ID NO: 10568 - RNA, 22 nt, synthetic construct
  source 1..22: mol_type = other RNA
agaaggactagtattcaagaac

SEQ ID NO: 10569 - RNA, 22 nt, synthetic construct
  source 1..22: mol_type = other RNA
agagaaatttctgtgggttctt

SEQ ID NO: 10570 - RNA, 22 nt, synthetic construct
  source 1..22: mol_type = other RNA
agagcaccaagaactactccct

SEQ ID NO: 10571 - RNA, 22 nt, synthetic construct
  source 1..22: mol_type = other RNA
agatagagaaatttctgtgggt

SEQ ID NO: 10572 - RNA, 22 nt, synthetic construct
  source 1..22: mol_type = other RNA
agatttatattcttttatcagc

SEQ ID NO: 10573 - RNA, 22 nt, synthetic construct
  source 1..22: mol_type = other RNA
agcaccaagaactactcccttt

SEQ ID NO: 10574 - RNA, 22 nt, synthetic construct
  source 1..22: mol_type = other RNA
agccaagagcaccaagaactac

SEQ ID NO: 10575 - RNA, 22 nt, synthetic construct
  source 1..22: mol_type = other RNA
agctcagaaggactagtattca

SEQ ID NO: 10576 - RNA, 22 nt, synthetic construct
  source 1..22: mol_type = other RNA
agctgataaaagaatataaatc

SEQ ID NO: 10577 - RNA, 22 nt, synthetic construct
  source 1..22: mol_type = other RNA
aggaaacccaccaaagtgtctt

SEQ ID NO: 10578 - RNA, 22 nt, synthetic construct
  source 1..22: mol_type = other RNA
aggactagtattcaagaaccca

SEQ ID NO: 10579 - RNA, 22 nt, synthetic construct
  source 1..22: mol_type = other RNA
agggagtagttcttggtgctct

SEQ ID NO: 10580 - RNA, 22 nt, synthetic construct
  source 1..22: mol_type = other RNA
agtagttcttggtgctcttggc

SEQ ID NO: 10581 - RNA, 22 nt, synthetic construct
  source 1..22: mol_type = other RNA
agtattcaagaacccacagaaa

SEQ ID NO: 10582 - RNA, 22 nt, synthetic construct
  source 1..22: mol_type = other RNA
agtccttctgagctgataaaag

SEQ ID NO: 10583 - RNA, 22 nt, synthetic construct
  source 1..22: mol_type = other RNA
agtgtcttaccatcatgtttta

SEQ ID NO: 10584 - RNA, 22 nt, synthetic construct
  source 1..22: mol_type = other RNA
agttcttggtgctcttggcttg

SEQ ID NO: 10585 - RNA, 22 nt, synthetic construct
  source 1..22: mol_type = other RNA
agttgaatgaaataagaaatgt

SEQ ID NO: 10586 - RNA, 22 nt, synthetic construct
  source 1..22: mol_type = other RNA
ataagaaatgtaaaacatgatg

SEQ ID NO: 10587 - RNA, 22 nt, synthetic construct
  source 1..22: mol_type = other RNA
atactagtccttctgagctgat

SEQ ID NO: 10588 - RNA, 22 nt, synthetic construct
  source 1..22: mol_type = other RNA
atagagaaatttctgtgggttc

SEQ ID NO: 10589 - RNA, 22 nt, synthetic construct
  source 1..22: mol_type = other RNA
atattcttttatcagctcagaa

SEQ ID NO: 10590 - RNA, 22 nt, synthetic construct
  source 1..22: mol_type = other RNA
atcagctcagaaggactagtat

SEQ ID NO: 10591 - RNA, 22 nt, synthetic construct
  source 1..22: mol_type = other RNA
atcttccaagccaagagcacca

SEQ ID NO: 10592 - RNA, 22 nt, synthetic construct
  source 1..22: mol_type = other RNA
atgatggtaagacactttggtg

SEQ ID NO: 10593 - RNA, 22 nt, synthetic construct
  source 1..22: mol_type = other RNA
atggtaagacactttggtgggt

SEQ ID NO: 10594 - RNA, 22 nt, synthetic construct
  source 1..22: mol_type = other RNA
atgtaaaacatgatggtaagac

SEQ ID NO: 10595 - RNA, 22 nt, synthetic construct
  source 1..22: mol_type = other RNA
attcaactgaagaaagggagta

SEQ ID NO: 10596 - RNA, 22 nt, synthetic construct
  source 1..22: mol_type = other RNA
attcaagaacccacagaaattt

SEQ ID NO: 10597 - RNA, 22 nt, synthetic construct
  source 1..22: mol_type = other RNA
attcttttatcagctcagaagg

SEQ ID NO: 10598 - RNA, 22 nt, synthetic construct
  source 1..22: mol_type = other RNA
atttatattcttttatcagctc

SEQ ID NO: 10599 - RNA, 22 nt, synthetic construct
  source 1..22: mol_type = other RNA
atttcattcaactgaagaaagg

SEQ ID NO: 10600 - RNA, 22 nt, synthetic construct
  source 1..22: mol_type = other RNA
atttctctatcttccaagccaa

SEQ ID NO: 10601 - RNA, 22 nt, synthetic construct
  source 1..22: mol_type = other RNA
atttctgtgggttcttgaatac

SEQ ID NO: 10602 - RNA, 22 nt, synthetic construct
  source 1..22: mol_type = other RNA
atttcttatttcattcaactga

SEQ ID NO: 10603 - RNA, 22 nt, synthetic construct
  source 1..22: mol_type = other RNA
caaagtgtcttaccatcatgtt

SEQ ID NO: 10604 - RNA, 22 nt, synthetic construct
  source 1..22: mol_type = other RNA
caactgaagaaagggagtagtt

SEQ ID NO: 10605 - RNA, 22 nt, synthetic construct
  source 1..22: mol_type = other RNA
caagaacccacagaaatttctc

SEQ ID NO: 10606 - RNA, 22 nt, synthetic construct
  source 1..22: mol_type = other RNA
caagaactactccctttcttca

SEQ ID NO: 10607 - RNA, 22 nt, synthetic construct
  source 1..22: mol_type = other RNA
caagaaggaaacccaccaaagt

SEQ ID NO: 10608 - RNA, 22 nt, synthetic construct
  source 1..22: mol_type = other RNA
caagagcaccaagaactactcc

SEQ ID NO: 10609 - RNA, 22 nt, synthetic construct
  source 1..22: mol_type = other RNA
caagccaagagcaccaagaact

SEQ ID NO: 10610 - RNA, 22 nt, synthetic construct
  source 1..22: mol_type = other RNA
cacagaaatttctctatcttcc

SEQ ID NO: 10611 - RNA, 22 nt, synthetic construct
  source 1..22: mol_type = other RNA
caccaaagtgtcttaccatcat

SEQ ID NO: 10612 - RNA, 22 nt, synthetic construct
  source 1..22: mol_type = other RNA
caccaagaactactccctttct

SEQ ID NO: 10613 - RNA, 22 nt, synthetic construct
  source 1..22: mol_type = other RNA
cagaaatttctctatcttccaa

SEQ ID NO: 10614 - RNA, 22 nt, synthetic construct
  source 1..22: mol_type = other RNA
cagaaggactagtattcaagaa

SEQ ID NO: 10615 - RNA, 22 nt, synthetic construct
  source 1..22: mol_type = other RNA
cagatttatattcttttatcag

SEQ ID NO: 10616 - RNA, 22 nt, synthetic construct
  source 1..22: mol_type = other RNA
cagctcagaaggactagtattc

SEQ ID NO: 10617 - RNA, 22 nt, synthetic construct
  source 1..22: mol_type = other RNA
cagttgaatgaaataagaaatg

SEQ ID NO: 10618 - RNA, 22 nt, synthetic construct
  source 1..22: mol_type = other RNA
catcatgttttacatttcttat

SEQ ID NO: 10619 - RNA, 22 nt, synthetic construct
  source 1..22: mol_type = other RNA
catgatggtaagacactttggt

SEQ ID NO: 10620 - RNA, 22 nt, synthetic construct
  source 1..22: mol_type = other RNA
catgttttacatttcttatttc

SEQ ID NO: 10621 - RNA, 22 nt, synthetic construct
  source 1..22: mol_type = other RNA
cattcaactgaagaaagggagt

SEQ ID NO: 10622 - RNA, 22 nt, synthetic construct
  source 1..22: mol_type = other RNA
catttcttatttcattcaactg

SEQ ID NO: 10623 - RNA, 22 nt, synthetic construct
  source 1..22: mol_type = other RNA
ccaaagtgtcttaccatcatgt

SEQ ID NO: 10624 - RNA, 22 nt, synthetic construct
  source 1..22: mol_type = other RNA
ccaagaactactccctttcttc

SEQ ID NO: 10625 - RNA, 22 nt, synthetic construct
  source 1..22: mol_type = other RNA
ccaagagcaccaagaactactc

SEQ ID NO: 10626 - RNA, 22 nt, synthetic construct
  source 1..22: mol_type = other RNA
ccaagccaagagcaccaagaac

SEQ ID NO: 10627 - RNA, 22 nt, synthetic construct
  source 1..22: mol_type = other RNA
ccacagaaatttctctatcttc

SEQ ID NO: 10628 - RNA, 22 nt, synthetic construct
  source 1..22: mol_type = other RNA
ccaccaaagtgtcttaccatca

SEQ ID NO: 10629 - RNA, 22 nt, synthetic construct
  source 1..22: mol_type = other RNA
ccatcatgttttacatttctta

SEQ ID NO: 10630 - RNA, 22 nt, synthetic construct
  source 1..22: mol_type = other RNA
cccacagaaatttctctatctt

SEQ ID NO: 10631 - RNA, 22 nt, synthetic construct
  source 1..22: mol_type = other RNA
cccaccaaagtgtcttaccatc

SEQ ID NO: 10632 - RNA, 22 nt, synthetic construct
  source 1..22: mol_type = other RNA
ccctttcttcagttgaatgaaa

SEQ ID NO: 10633 - RNA, 22 nt, synthetic construct
  source 1..22: mol_type = other RNA
ccttctgagctgataaaagaat

SEQ ID NO: 10634 - RNA, 22 nt, synthetic construct
  source 1..22: mol_type = other RNA
cctttcttcagttgaatgaaat

SEQ ID NO: 10635 - RNA, 22 nt, synthetic construct
  source 1..22: mol_type = other RNA
ctactccctttcttcagttgaa

SEQ ID NO: 10636 - RNA, 22 nt, synthetic construct
  source 1..22: mol_type = other RNA
ctagtattcaagaacccacaga

SEQ ID NO: 10637 - RNA, 22 nt, synthetic construct
  source 1..22: mol_type = other RNA
ctagtccttctgagctgataaa

SEQ ID NO: 10638 - RNA, 22 nt, synthetic construct
  source 1..22: mol_type = other RNA
ctatcttccaagccaagagcac

SEQ ID NO: 10639 - RNA, 22 nt, synthetic construct
  source 1..22: mol_type = other RNA
ctcagaaggactagtattcaag

SEQ ID NO: 10640 - RNA, 22 nt, synthetic construct
  source 1..22: mol_type = other RNA
ctccctttcttcagttgaatga

SEQ ID NO: 10641 - RNA, 22 nt, synthetic construct
  source 1..22: mol_type = other RNA
ctctatcttccaagccaagagc

SEQ ID NO: 10642 - RNA, 22 nt, synthetic construct
  source 1..22: mol_type = other RNA
ctcttggcttggaagatagaga

SEQ ID NO: 10643 - RNA, 22 nt, synthetic construct
  source 1..22: mol_type = other RNA
ctgaagaaagggagtagttctt

SEQ ID NO: 10644 - RNA, 22 nt, synthetic construct
  source 1..22: mol_type = other RNA
ctgagctgataaaagaatataa

SEQ ID NO: 10645 - RNA, 22 nt, synthetic construct
  source 1..22: mol_type = other RNA
ctgataaaagaatataaatctg

SEQ ID NO: 10646 - RNA, 22 nt, synthetic construct
  source 1..22: mol_type = other RNA
ctgtgggttcttgaatactagt

SEQ ID NO: 10647 - RNA, 22 nt, synthetic construct
  source 1..22: mol_type = other RNA
cttaccatcatgttttacattt

SEQ ID NO: 10648 - RNA, 22 nt, synthetic construct
  source 1..22: mol_type = other RNA
cttatttcattcaactgaagaa

SEQ ID NO: 10649 - RNA, 22 nt, synthetic construct
  source 1..22: mol_type = other RNA
cttcagttgaatgaaataagaa

SEQ ID NO: 10650 - RNA, 22 nt, synthetic construct
  source 1..22: mol_type = other RNA
cttccaagccaagagcaccaag

SEQ ID NO: 10651 - RNA, 22 nt, synthetic construct
  source 1..22: mol_type = other RNA
cttctgagctgataaaagaata

SEQ ID NO: 10652 - RNA, 22 nt, synthetic construct
  source 1..22: mol_type = other RNA
cttgaatactagtccttctgag

SEQ ID NO: 10653 - RNA, 22 nt, synthetic construct
  source 1..22: mol_type = other RNA
cttggaagatagagaaatttct

SEQ ID NO: 10654 - RNA, 22 nt, synthetic construct
  source 1..22: mol_type = other RNA
cttggcttggaagatagagaaa

SEQ ID NO: 10655 - RNA, 22 nt, synthetic construct
  source 1..22: mol_type = other RNA
cttggtgctcttggcttggaag

SEQ ID NO: 10656 - RNA, 22 nt, synthetic construct
  source 1..22: mol_type = other RNA
ctttcttcagttgaatgaaata

SEQ ID NO: 10657 - RNA, 22 nt, synthetic construct
  source 1..22: mol_type = other RNA
cttttatcagctcagaaggact

SEQ ID NO: 10658 - RNA, 22 nt, synthetic construct
  source 1..22: mol_type = other RNA
gaaacccaccaaagtgtcttac

SEQ ID NO: 10659 - RNA, 22 nt, synthetic construct
  source 1..22: mol_type = other RNA
gaaagggagtagttcttggtgc

SEQ ID NO: 10660 - RNA, 22 nt, synthetic construct
  source 1..22: mol_type = other RNA
gaaataagaaatgtaaaacatg

SEQ ID NO: 10661 - RNA, 22 nt, synthetic construct
  source 1..22: mol_type = other RNA
gaaatgtaaaacatgatggtaa

SEQ ID NO: 10662 - RNA, 22 nt, synthetic construct
  source 1..22: mol_type = other RNA
gaaatttctctatcttccaagc

SEQ ID NO: 10663 - RNA, 22 nt, synthetic construct
  source 1..22: mol_type = other RNA
gaaatttctgtgggttcttgaa

SEQ ID NO: 10664 - RNA, 22 nt, synthetic construct
  source 1..22: mol_type = other RNA
gaacccacagaaatttctctat

SEQ ID NO: 10665 - RNA, 22 nt, synthetic construct
  source 1..22: mol_type = other RNA
gaactactccctttcttcagtt

SEQ ID NO: 10666 - RNA, 22 nt, synthetic construct
  source 1..22: mol_type = other RNA
gaagaaagggagtagttcttgg

SEQ ID NO: 10667 - RNA, 22 nt, synthetic construct
  source 1..22: mol_type = other RNA
gaagatagagaaatttctgtgg

SEQ ID NO: 10668 - RNA, 22 nt, synthetic construct
  source 1..22: mol_type = other RNA
gaaggaaacccaccaaagtgtc

SEQ ID NO: 10669 - RNA, 22 nt, synthetic construct
  source 1..22: mol_type = other RNA
gaaggactagtattcaagaacc

SEQ ID NO: 10670 - RNA, 22 nt, synthetic construct
  source 1..22: mol_type = other RNA
gaatactagtccttctgagctg

SEQ ID NO: 10671 - RNA, 22 nt, synthetic construct
  source 1..22: mol_type = other RNA
gactagtattcaagaacccaca

SEQ ID NO: 10672 - RNA, 22 nt, synthetic construct
  source 1..22: mol_type = other RNA
gagaaatttctgtgggttcttg

SEQ ID NO: 10673 - RNA, 22 nt, synthetic construct
  source 1..22: mol_type = other RNA
gagcaccaagaactactccctt

SEQ ID NO: 10674 - RNA, 22 nt, synthetic construct
  source 1..22: mol_type = other RNA
gagctgataaaagaatataaat

SEQ ID NO: 10675 - RNA, 22 nt, synthetic construct
  source 1..22: mol_type = other RNA
gagtagttcttggtgctcttgg

SEQ ID NO: 10676 - RNA, 22 nt, synthetic construct
  source 1..22: mol_type = other RNA
gatagagaaatttctgtgggtt

SEQ ID NO: 10677 - RNA, 22 nt, synthetic construct
  source 1..22: mol_type = other RNA
gatggtaagacactttggtggg

SEQ ID NO: 10678 - RNA, 22 nt, synthetic construct
  source 1..22: mol_type = other RNA
gatttatattcttttatcagct

SEQ ID NO: 10679 - RNA, 22 nt, synthetic construct
  source 1..22: mol_type = other RNA
gcaccaagaactactccctttc

SEQ ID NO: 10680 - RNA, 22 nt, synthetic construct
  source 1..22: mol_type = other RNA
gccaagagcaccaagaactact

SEQ ID NO: 10681 - RNA, 22 nt, synthetic construct
  source 1..22: mol_type = other RNA
gctcagaaggactagtattcaa

SEQ ID NO: 10682 - RNA, 22 nt, synthetic construct
  source 1..22: mol_type = other RNA
gctcttggcttggaagatagag

SEQ ID NO: 10683 - RNA, 22 nt, synthetic construct
  source 1..22: mol_type = other RNA
gctgataaaagaatataaatct

SEQ ID NO: 10684 - RNA, 22 nt, synthetic construct
  source 1..22: mol_type = other RNA
gcttggaagatagagaaatttc

SEQ ID NO: 10685 - RNA, 22 nt, synthetic construct
  source 1..22: mol_type = other RNA
ggaaacccaccaaagtgtctta

SEQ ID NO: 10686 - RNA, 22 nt, synthetic construct
  source 1..22: mol_type = other RNA
ggaagatagagaaatttctgtg

SEQ ID NO: 10687 - RNA, 22 nt, synthetic construct
  source 1..22: mol_type = other RNA
ggactagtattcaagaacccac

SEQ ID NO: 10688 - RNA, 22 nt, synthetic construct
  source 1..22: mol_type = other RNA
ggagtagttcttggtgctcttg

SEQ ID NO: 10689 - RNA, 22 nt, synthetic construct
  source 1..22: mol_type = other RNA
ggcttggaagatagagaaattt

SEQ ID NO: 10690 - RNA, 22 nt, synthetic construct
  source 1..22: mol_type = other RNA
gggagtagttcttggtgctctt

SEQ ID NO: 10691 - RNA, 22 nt, synthetic construct
  source 1..22: mol_type = other RNA
gggttcttgaatactagtcctt

SEQ ID NO: 10692 - RNA, 22 nt, synthetic construct
  source 1..22: mol_type = other RNA
ggtaagacactttggtgggttt

SEQ ID NO: 10693 - RNA, 22 nt, synthetic construct
  source 1..22: mol_type = other RNA
ggtgctcttggcttggaagata

SEQ ID NO: 10694 - RNA, 22 nt, synthetic construct
  source 1..22: mol_type = other RNA
ggttcttgaatactagtccttc

SEQ ID NO: 10695 - RNA, 22 nt, synthetic construct
  source 1..22: mol_type = other RNA
gtaaaacatgatggtaagacac

SEQ ID NO: 10696 - RNA, 22 nt, synthetic construct
  source 1..22: mol_type = other RNA
gtaagacactttggtgggtttc

SEQ ID NO: 10697 - RNA, 22 nt, synthetic construct
  source 1..22: mol_type = other RNA
gtagttcttggtgctcttggct

SEQ ID NO: 10698 - RNA, 22 nt, synthetic construct
  source 1..22: mol_type = other RNA
gtattcaagaacccacagaaat

SEQ ID NO: 10699 - RNA, 22 nt, synthetic construct
  source 1..22: mol_type = other RNA
gtccttctgagctgataaaaga

SEQ ID NO: 10700 - RNA, 22 nt, synthetic construct
  source 1..22: mol_type = other RNA
gtcttaccatcatgttttacat

SEQ ID NO: 10701 - RNA, 22 nt, synthetic construct
  source 1..22: mol_type = other RNA
gtgctcttggcttggaagatag

SEQ ID NO: 10702 - RNA, 22 nt, synthetic construct
  source 1..22: mol_type = other RNA
gtgggttcttgaatactagtcc

SEQ ID NO: 10703 - RNA, 22 nt, synthetic construct
  source 1..22: mol_type = other RNA
gtgtcttaccatcatgttttac

SEQ ID NO: 10704 - RNA, 22 nt, synthetic construct
  source 1..22: mol_type = other RNA
gttcttgaatactagtccttct

SEQ ID NO: 10705 - RNA, 22 nt, synthetic construct
  source 1..22: mol_type = other RNA
gttcttggtgctcttggcttgg

SEQ ID NO: 10706 - RNA, 22 nt, synthetic construct
  source 1..22: mol_type = other RNA
gttgaatgaaataagaaatgta

SEQ ID NO: 10707 - RNA, 22 nt, synthetic construct
  source 1..22: mol_type = other RNA
taaaacatgatggtaagacact

SEQ ID NO: 10708 - RNA, 22 nt, synthetic construct
  source 1..22: mol_type = other RNA
taagaaatgtaaaacatgatgg

SEQ ID NO: 10709 - RNA, 22 nt, synthetic construct
  source 1..22: mol_type = other RNA
tacatttcttatttcattcaac

SEQ ID NO: 10710 - RNA, 22 nt, synthetic construct
  source 1..22: mol_type = other RNA
taccatcatgttttacatttct

SEQ ID NO: 10711 - RNA, 22 nt, synthetic construct
  source 1..22: mol_type = other RNA
tactagtccttctgagctgata

SEQ ID NO: 10712 - RNA, 22 nt, synthetic construct
  source 1..22: mol_type = other RNA
tactccctttcttcagttgaat

SEQ ID NO: 10713 - RNA, 22 nt, synthetic construct
  source 1..22: mol_type = other RNA
tagagaaatttctgtgggttct

SEQ ID NO: 10714 - RNA, 22 nt, synthetic construct
  source 1..22: mol_type = other RNA
tagtattcaagaacccacagaa

SEQ ID NO: 10715 - RNA, 22 nt, synthetic construct
  source 1..22: mol_type = other RNA
tagtccttctgagctgataaaa

SEQ ID NO: 10716 - RNA, 22 nt, synthetic construct
  source 1..22: mol_type = other RNA
tagttcttggtgctcttggctt

SEQ ID NO: 10717 - RNA, 22 nt, synthetic construct
  source 1..22: mol_type = other RNA
tatattcttttatcagctcaga

SEQ ID NO: 10718 - RNA, 22 nt, synthetic construct
  source 1..22: mol_type = other RNA
tatcagctcagaaggactagta

SEQ ID NO: 10719 - RNA, 22 nt, synthetic construct
  source 1..22: mol_type = other RNA
tatcttccaagccaagagcacc

SEQ ID NO: 10720 - RNA, 22 nt, synthetic construct
  source 1..22: mol_type = other RNA
tattcaagaacccacagaaatt

SEQ ID NO: 10721 - RNA, 22 nt, synthetic construct
  source 1..22: mol_type = other RNA
tattcttttatcagctcagaag

SEQ ID NO: 10722 - RNA, 22 nt, synthetic construct
  source 1..22: mol_type = other RNA
tatttcattcaactgaagaaag

SEQ ID NO: 10723 - RNA, 22 nt, synthetic construct
  source 1..22: mol_type = other RNA
tcaactgaagaaagggagtagt

SEQ ID NO: 10724 - RNA, 22 nt, synthetic construct
  source 1..22: mol_type = other RNA
tcaagaacccacagaaatttct

SEQ ID NO: 10725 - RNA, 22 nt, synthetic construct
  source 1..22: mol_type = other RNA
tcaagaaggaaacccaccaaag

SEQ ID NO: 10726 - RNA, 22 nt, synthetic construct
  source 1..22: mol_type = other RNA
tcagaaggactagtattcaaga

SEQ ID NO: 10727 - RNA, 22 nt, synthetic construct
  source 1..22: mol_type = other RNA
tcagctcagaaggactagtatt

SEQ ID NO: 10728 - RNA, 22 nt, synthetic construct
  source 1..22: mol_type = other RNA
tcagttgaatgaaataagaaat

SEQ ID NO: 10729 - RNA, 22 nt, synthetic construct
  source 1..22: mol_type = other RNA
tcattcaactgaagaaagggag

SEQ ID NO: 10730 - RNA, 22 nt, synthetic construct
  source 1..22: mol_type = other RNA
tccaagccaagagcaccaagaa

SEQ ID NO: 10731 - RNA, 22 nt, synthetic construct
  source 1..22: mol_type = other RNA
tccctttcttcagttgaatgaa

SEQ ID NO: 10732 - RNA, 22 nt, synthetic construct
  source 1..22: mol_type = other RNA
tccttctgagctgataaaagaa

SEQ ID NO: 10733 - RNA, 22 nt, synthetic construct
  source 1..22: mol_type = other RNA
tctatcttccaagccaagagca

SEQ ID NO: 10734 - RNA, 22 nt, synthetic construct
  source 1..22: mol_type = other RNA
tctctatcttccaagccaagag

SEQ ID NO: 10735 - RNA, 22 nt, synthetic construct
  source 1..22: mol_type = other RNA
tctgagctgataaaagaatata

SEQ ID NO: 10736 - RNA, 22 nt, synthetic construct
  source 1..22: mol_type = other RNA
tctgtgggttcttgaatactag

SEQ ID NO: 10737 - RNA, 22 nt, synthetic construct
  source 1..22: mol_type = other RNA
tcttaccatcatgttttacatt

SEQ ID NO: 10738 - RNA, 22 nt, synthetic construct
  source 1..22: mol_type = other RNA
tcttatttcattcaactgaaga

SEQ ID NO: 10739 - RNA, 22 nt, synthetic construct
  source 1..22: mol_type = other RNA
tcttcagttgaatgaaataaga

SEQ ID NO: 10740 - RNA, 22 nt, synthetic construct
  source 1..22: mol_type = other RNA
tcttccaagccaagagcaccaa

SEQ ID NO: 10741 - RNA, 22 nt, synthetic construct
  source 1..22: mol_type = other RNA
tcttgaatactagtccttctga

SEQ ID NO: 10742 - RNA, 22 nt, synthetic construct
  source 1..22: mol_type = other RNA
tcttggcttggaagatagagaa

SEQ ID NO: 10743 - RNA, 22 nt, synthetic construct
  source 1..22: mol_type = other RNA
tcttggtgctcttggcttggaa

SEQ ID NO: 10744 - RNA, 22 nt, synthetic construct
  source 1..22: mol_type = other RNA
tcttttatcagctcagaaggac

SEQ ID NO: 10745 - RNA, 22 nt, synthetic construct
  source 1..22: mol_type = other RNA
tgaagaaagggagtagttcttg

SEQ ID NO: 10746 - RNA, 22 nt, synthetic construct
  source 1..22: mol_type = other RNA
tgaatactagtccttctgagct

SEQ ID NO: 10747 - RNA, 22 nt, synthetic construct
  source 1..22: mol_type = other RNA
tgagctgataaaagaatataaa

SEQ ID NO: 10748 - RNA, 22 nt, synthetic construct
  source 1..22: mol_type = other RNA
tgatggtaagacactttggtgg

SEQ ID NO: 10749 - RNA, 22 nt, synthetic construct
  source 1..22: mol_type = other RNA
tgctcttggcttggaagataga

SEQ ID NO: 10750 - RNA, 22 nt, synthetic construct
  source 1..22: mol_type = other RNA
tggaagatagagaaatttctgt

SEQ ID NO: 10751 - RNA, 22 nt, synthetic construct
  source 1..22: mol_type = other RNA
tggcttggaagatagagaaatt

SEQ ID NO: 10752 - RNA, 22 nt, synthetic construct
  source 1..22: mol_type = other RNA
tgggttcttgaatactagtcct

SEQ ID NO: 10753 - RNA, 22 nt, synthetic construct
  source 1..22: mol_type = other RNA
tggtaagacactttggtgggtt

SEQ ID NO: 10754 - RNA, 22 nt, synthetic construct
  source 1..22: mol_type = other RNA
tggtgctcttggcttggaagat

SEQ ID NO: 10755 - RNA, 22 nt, synthetic construct
  source 1..22: mol_type = other RNA
tgtaaaacatgatggtaagaca

SEQ ID NO: 10756 - RNA, 22 nt, synthetic construct
  source 1..22: mol_type = other RNA
tgtcttaccatcatgttttaca

SEQ ID NO: 10757 - RNA, 22 nt, synthetic construct
  source 1..22: mol_type = other RNA
tgtgggttcttgaatactagtc

SEQ ID NO: 10758 - RNA, 22 nt, synthetic construct
  source 1..22: mol_type = other RNA
ttaccatcatgttttacatttc

SEQ ID NO: 10759 - RNA, 22 nt, synthetic construct
  source 1..22: mol_type = other RNA
ttatattcttttatcagctcag

SEQ ID NO: 10760 - RNA, 22 nt, synthetic construct
  source 1..22: mol_type = other RNA
ttatcagctcagaaggactagt

SEQ ID NO: 10761 - RNA, 22 nt, synthetic construct
  source 1..22: mol_type = other RNA
ttatttcattcaactgaagaaa

SEQ ID NO: 10762 - RNA, 22 nt, synthetic construct
  source 1..22: mol_type = other RNA
ttcaactgaagaaagggagtag

SEQ ID NO: 10763 - RNA, 22 nt, synthetic construct
  source 1..22: mol_type = other RNA
ttcaagaacccacagaaatttc

SEQ ID NO: 10764 - RNA, 22 nt, synthetic construct
  source 1..22: mol_type = other RNA
ttcagttgaatgaaataagaaa

SEQ ID NO: 10765 - RNA, 22 nt, synthetic construct
  source 1..22: mol_type = other RNA
ttcattcaactgaagaaaggga

SEQ ID NO: 10766 - RNA, 22 nt, synthetic construct
  source 1..22: mol_type = other RNA
ttccaagccaagagcaccaaga

SEQ ID NO: 10767 - RNA, 22 nt, synthetic construct
  source 1..22: mol_type = other RNA
ttctctatcttccaagccaaga

SEQ ID NO: 10768 - RNA, 22 nt, synthetic construct
  source 1..22: mol_type = other RNA
ttctgagctgataaaagaatat

SEQ ID NO: 10769 - RNA, 22 nt, synthetic construct
  source 1..22: mol_type = other RNA
ttctgtgggttcttgaatacta

SEQ ID NO: 10770 - RNA, 22 nt, synthetic construct
  source 1..22: mol_type = other RNA
ttcttatttcattcaactgaag

SEQ ID NO: 10771 - RNA, 22 nt, synthetic construct
  source 1..22: mol_type = other RNA
ttcttcagttgaatgaaataag

SEQ ID NO: 10772 - RNA, 22 nt, synthetic construct
  source 1..22: mol_type = other RNA
ttcttgaatactagtccttctg

SEQ ID NO: 10773 - RNA, 22 nt, synthetic construct
  source 1..22: mol_type = other RNA
ttcttggtgctcttggcttgga

SEQ ID NO: 10774 - RNA, 22 nt, synthetic construct
  source 1..22: mol_type = other RNA
ttcttttatcagctcagaagga

SEQ ID NO: 10775 - RNA, 22 nt, synthetic construct
  source 1..22: mol_type = other RNA
ttgaatactagtccttctgagc

SEQ ID NO: 10776 - RNA, 22 nt, synthetic construct
  source 1..22: mol_type = other RNA
ttggaagatagagaaatttctg

SEQ ID NO: 10777 - RNA, 22 nt, synthetic construct
  source 1..22: mol_type = other RNA
ttggcttggaagatagagaaat

SEQ ID NO: 10778 - RNA, 22 nt, synthetic construct
  source 1..22: mol_type = other RNA
ttggtgctcttggcttggaaga

SEQ ID NO: 10779 - RNA, 22 nt, synthetic construct
  source 1..22: mol_type = other RNA
tttatattcttttatcagctca

SEQ ID NO: 10780 - RNA, 22 nt, synthetic construct
  source 1..22: mol_type = other RNA
tttatcagctcagaaggactag

SEQ ID NO: 10781 - RNA, 22 nt, synthetic construct
  source 1..22: mol_type = other RNA
tttcattcaactgaagaaaggg

SEQ ID NO: 10782 - RNA, 22 nt, synthetic construct
  source 1..22: mol_type = other RNA
tttctctatcttccaagccaag

SEQ ID NO: 10783 - RNA, 22 nt, synthetic construct
  source 1..22: mol_type = other RNA
tttctgtgggttcttgaatact

SEQ ID NO: 10784 - RNA, 22 nt, synthetic construct
  source 1..22: mol_type = other RNA
tttcttatttcattcaactgaa

SEQ ID NO: 10785 - RNA, 22 nt, synthetic construct
  source 1..22: mol_type = other RNA
tttcttcagttgaatgaaataa

SEQ ID NO: 10786 - RNA, 22 nt, synthetic construct
  source 1..22: mol_type = other RNA
ttttatcagctcagaaggacta

SEQ ID NO: 10787 - RNA, 20 nt, synthetic construct
  source 1..20: mol_type = other RNA
aaaaacttgagagttgctgg

SEQ ID NO: 10788 - RNA, 20 nt, synthetic construct
  source 1..20: mol_type = other RNA
aaaacctgtctaaggagaat

SEQ ID NO: 10789 - RNA, 20 nt, synthetic construct
  source 1..20: mol_type = other RNA
aaaacttgagagttgctggg

SEQ ID NO: 10790 - RNA, 20 nt, synthetic construct
  source 1..20: mol_type = other RNA
aaacttgagagttgctgggt

SEQ ID NO: 10791 - RNA, 20 nt, synthetic construct
  source 1..20: mol_type = other RNA
aaatggtggtacattcagca

SEQ ID NO: 10792 - RNA, 20 nt, synthetic construct
  source 1..20: mol_type = other RNA
aacagaggtgaacatacaag

SEQ ID NO: 10793 - RNA, 20 nt, synthetic construct
  source 1..20: mol_type = other RNA
aacatacaagtggcatgtat

SEQ ID NO: 10794 - RNA, 20 nt, synthetic construct
  source 1..20: mol_type = other RNA
aacatcacagtagacatgaa

SEQ ID NO: 10795 - RNA, 20 nt, synthetic construct
  source 1..20: mol_type = other RNA
aacattttattgattctagg

SEQ ID NO: 10796 - RNA, 20 nt, synthetic construct
  source 1..20: mol_type = other RNA
aactctcaagtttttcatgt

SEQ ID NO: 10797 - RNA, 20 nt, synthetic construct
  source 1..20: mol_type = other RNA
aacttgagagttgctgggtc

SEQ ID NO: 10798 - RNA, 20 nt, synthetic construct
  source 1..20: mol_type = other RNA
aagtggcatgtatgccatca

SEQ ID NO: 10799 - RNA, 20 nt, synthetic construct
  source 1..20: mol_type = other RNA
aagtttttcatgtctactgt

SEQ ID NO: 10800 - RNA, 20 nt, synthetic construct
  source 1..20: mol_type = other RNA
aatgcctagaatcaataaaa

SEQ ID NO: 10801 - RNA, 20 nt, synthetic construct
  source 1..20: mol_type = other RNA
aatggtggtacattcagcag

SEQ ID NO: 10802 - RNA, 20 nt, synthetic construct
  source 1..20: mol_type = other RNA
aatgtaccaccatttataac

SEQ ID NO: 10803 - RNA, 20 nt, synthetic construct
  source 1..20: mol_type = other RNA
acaagtggcatgtatgccat

SEQ ID NO: 10804 - RNA, 20 nt, synthetic construct
  source 1..20: mol_type = other RNA
acagaggtgaacatacaagt

SEQ ID NO: 10805 - RNA, 20 nt, synthetic construct
  source 1..20: mol_type = other RNA
acaggttttacctgatataa

SEQ ID NO: 10806 - RNA, 20 nt, synthetic construct
  source 1..20: mol_type = other RNA
acagtagacatgaaaaactt

SEQ ID NO: 10807 - RNA, 20 nt, synthetic construct
  source 1..20: mol_type = other RNA
acatacaagtggcatgtatg

SEQ ID NO: 10808 - RNA, 20 nt, synthetic construct
  source 1..20: mol_type = other RNA
acatcacagtagacatgaaa

SEQ ID NO: 10809 - RNA, 20 nt, synthetic construct
  source 1..20: mol_type = other RNA
acatgaaaaacttgagagtt

SEQ ID NO: 10810 - RNA, 20 nt, synthetic construct
  source 1..20: mol_type = other RNA
acatgccacttgtatgttca

SEQ ID NO: 10811 - RNA, 20 nt, synthetic construct
  source 1..20: mol_type = other RNA
acattcagcaggaatgccta

SEQ ID NO: 10812 - RNA, 20 nt, synthetic construct
  source 1..20: mol_type = other RNA
acattttattgattctaggc

SEQ ID NO: 10813 - RNA, 20 nt, synthetic construct
  source 1..20: mol_type = other RNA
accaccatttataacagagg

SEQ ID NO: 10814 - RNA, 20 nt, synthetic construct
  source 1..20: mol_type = other RNA
accatttataacagaggtga

SEQ ID NO: 10815 - RNA, 20 nt, synthetic construct
  source 1..20: mol_type = other RNA
acccagcaactctcaagttt

SEQ ID NO: 10816 - RNA, 20 nt, synthetic construct
  source 1..20: mol_type = other RNA
acctctgttataaatggtgg

SEQ ID NO: 10817 - RNA, 20 nt, synthetic construct
  source 1..20: mol_type = other RNA
acctgatataacatcacagt

SEQ ID NO: 10818 - RNA, 20 nt, synthetic construct
  source 1..20: mol_type = other RNA
actctcaagtttttcatgtc

SEQ ID NO: 10819 - RNA, 20 nt, synthetic construct
  source 1..20: mol_type = other RNA
actgtctattctccttagac

SEQ ID NO: 10820 - RNA, 20 nt, synthetic construct
  source 1..20: mol_type = other RNA
actgtgatgttatatcaggt

SEQ ID NO: 10821 - RNA, 20 nt, synthetic construct
  source 1..20: mol_type = other RNA
acttgagagttgctgggtct

SEQ ID NO: 10822 - RNA, 20 nt, synthetic construct
  source 1..20: mol_type = other RNA
acttgtatgttcacctctgt

SEQ ID NO: 10823 - RNA, 20 nt, synthetic construct
  source 1..20: mol_type = other RNA
agacaggttttacctgatat

SEQ ID NO: 10824 - RNA, 20 nt, synthetic construct
  source 1..20: mol_type = other RNA
agacatgaaaaacttgagag

SEQ ID NO: 10825 - RNA, 20 nt, synthetic construct
  source 1..20: mol_type = other RNA
agacccagcaactctcaagt

SEQ ID NO: 10826 - RNA, 20 nt, synthetic construct
  source 1..20: mol_type = other RNA
agaggtgaacatacaagtgg

SEQ ID NO: 10827 - RNA, 20 nt, synthetic construct
  source 1..20: mol_type = other RNA
agagttgctgggtctgatgg

SEQ ID NO: 10828 - RNA, 20 nt, synthetic construct
  source 1..20: mol_type = other RNA
agcaactctcaagtttttca

SEQ ID NO: 10829 - RNA, 20 nt, synthetic construct
  source 1..20: mol_type = other RNA
agcaggaatgcctagaatca

SEQ ID NO: 10830 - RNA, 20 nt, synthetic construct
  source 1..20: mol_type = other RNA
aggaatgcctagaatcaata

SEQ ID NO: 10831 - RNA, 20 nt, synthetic construct
  source 1..20: mol_type = other RNA
aggcattcctgctgaatgta

SEQ ID NO: 10832 - RNA, 20 nt, synthetic construct
  source 1..20: mol_type = other RNA
aggtaaaacctgtctaagga

SEQ ID NO: 10833 - RNA, 20 nt, synthetic construct
  source 1..20: mol_type = other RNA
aggtgaacatacaagtggca

SEQ ID NO: 10834 - RNA, 20 nt, synthetic construct
  source 1..20: mol_type = other RNA
aggttttacctgatataaca

SEQ ID NO: 10835 - RNA, 20 nt, synthetic construct
  source 1..20: mol_type = other RNA
agtagacatgaaaaacttga

SEQ ID NO: 10836 - RNA, 20 nt, synthetic construct
  source 1..20: mol_type = other RNA
agtggcatgtatgccatcag

SEQ ID NO: 10837 - RNA, 20 nt, synthetic construct
  source 1..20: mol_type = other RNA
agttgctgggtctgatggca

SEQ ID NO: 10838 - RNA, 20 nt, synthetic construct
  source 1..20: mol_type = other RNA
agtttttcatgtctactgtg

SEQ ID NO: 10839 - RNA, 20 nt, synthetic construct
  source 1..20: mol_type = other RNA
ataaatggtggtacattcag

SEQ ID NO: 10840 - RNA, 20 nt, synthetic construct
  source 1..20: mol_type = other RNA
ataacagaggtgaacataca

SEQ ID NO: 10841 - RNA, 20 nt, synthetic construct
  source 1..20: mol_type = other RNA
ataacatcacagtagacatg

SEQ ID NO: 10842 - RNA, 20 nt, synthetic construct
  source 1..20: mol_type = other RNA
atacaagtggcatgtatgcc

SEQ ID NO: 10843 - RNA, 20 nt, synthetic construct
  source 1..20: mol_type = other RNA
atacatgccacttgtatgtt

SEQ ID NO: 10844 - RNA, 20 nt, synthetic construct
  source 1..20: mol_type = other RNA
atataacatcacagtagaca

SEQ ID NO: 10845 - RNA, 20 nt, synthetic construct
  source 1..20: mol_type = other RNA
atatcaggtaaaacctgtct

SEQ ID NO: 10846 - RNA, 20 nt, synthetic construct
  source 1..20: mol_type = other RNA
atcacagtagacatgaaaaa

SEQ ID NO: 10847 - RNA, 20 nt, synthetic construct
  source 1..20: mol_type = other RNA
atcagacccagcaactctca

SEQ ID NO: 10848 - RNA, 20 nt, synthetic construct
  source 1..20: mol_type = other RNA
atcaggtaaaacctgtctaa

SEQ ID NO: 10849 - RNA, 20 nt, synthetic construct
  source 1..20: mol_type = other RNA
atctgatgtaataacatttt

SEQ ID NO: 10850 - RNA, 20 nt, synthetic construct
  source 1..20: mol_type = other RNA
atgaaaaacttgagagttgc

SEQ ID NO: 10851 - RNA, 20 nt, synthetic construct
  source 1..20: mol_type = other RNA
atgccacttgtatgttcacc

SEQ ID NO: 10852 - RNA, 20 nt, synthetic construct
  source 1..20: mol_type = other RNA
atgccatcagacccagcaac

SEQ ID NO: 10853 - RNA, 20 nt, synthetic construct
  source 1..20: mol_type = other RNA
atgcctagaatcaataaaat

SEQ ID NO: 10854 - RNA, 20 nt, synthetic construct
  source 1..20: mol_type = other RNA
atggcatacatgccacttgt

SEQ ID NO: 10855 - RNA, 20 nt, synthetic construct
  source 1..20: mol_type = other RNA
atggtggtacattcagcagg

SEQ ID NO: 10856 - RNA, 20 nt, synthetic construct
  source 1..20: mol_type = other RNA
atgtaccaccatttataaca

SEQ ID NO: 10857 - RNA, 20 nt, synthetic construct
  source 1..20: mol_type = other RNA
atgtatgccatcagacccag

SEQ ID NO: 10858 - RNA, 20 nt, synthetic construct
  source 1..20: mol_type = other RNA
atgtctactgtgatgttata

SEQ ID NO: 10859 - RNA, 20 nt, synthetic construct
  source 1..20: mol_type = other RNA
atgttatatcaggtaaaacc

SEQ ID NO: 10860 - RNA, 20 nt, synthetic construct
  source 1..20: mol_type = other RNA
atgttcacctctgttataaa

SEQ ID NO: 10861 - RNA, 20 nt, synthetic construct
  source 1..20: mol_type = other RNA
attcagcaggaatgcctaga

SEQ ID NO: 10862 - RNA, 20 nt, synthetic construct
  source 1..20: mol_type = other RNA
attcctgctgaatgtaccac

SEQ ID NO: 10863 - RNA, 20 nt, synthetic construct
  source 1..20: mol_type = other RNA
attctaggcattcctgctga

SEQ ID NO: 10864 - RNA, 20 nt, synthetic construct
  source 1..20: mol_type = other RNA
attctccttagacaggtttt

SEQ ID NO: 10865 - RNA, 20 nt, synthetic construct
  source 1..20: mol_type = other RNA
attgattctaggcattcctg

SEQ ID NO: 10866 - RNA, 20 nt, synthetic construct
  source 1..20: mol_type = other RNA
atttataacagaggtgaaca

SEQ ID NO: 10867 - RNA, 20 nt, synthetic construct
  source 1..20: mol_type = other RNA
attttattgattctaggcat

SEQ ID NO: 10868 - RNA, 20 nt, synthetic construct
  source 1..20: mol_type = other RNA
caactctcaagtttttcatg

SEQ ID NO: 10869 - RNA, 20 nt, synthetic construct
  source 1..20: mol_type = other RNA
caagtggcatgtatgccatc

SEQ ID NO: 10870 - RNA, 20 nt, synthetic construct
  source 1..20: mol_type = other RNA
caagtttttcatgtctactg

SEQ ID NO: 10871 - RNA, 20 nt, synthetic construct
  source 1..20: mol_type = other RNA
cacagtagacatgaaaaact

SEQ ID NO: 10872 - RNA, 20 nt, synthetic construct
  source 1..20: mol_type = other RNA
caccatttataacagaggtg

SEQ ID NO: 10873 - RNA, 20 nt, synthetic construct
  source 1..20: mol_type = other RNA
cacctctgttataaatggtg

SEQ ID NO: 10874 - RNA, 20 nt, synthetic construct
  source 1..20: mol_type = other RNA
cacttgtatgttcacctctg

SEQ ID NO: 10875 - RNA, 20 nt, synthetic construct
  source 1..20: mol_type = other RNA
cagacccagcaactctcaag

SEQ ID NO: 10876 - RNA, 20 nt, synthetic construct
  source 1..20: mol_type = other RNA
cagaggtgaacatacaagtg

SEQ ID NO: 10877 - RNA, 20 nt, synthetic construct
  source 1..20: mol_type = other RNA
cagcaactctcaagtttttc

SEQ ID NO: 10878 - RNA, 20 nt, synthetic construct
  source 1..20: mol_type = other RNA
cagcaggaatgcctagaatc

SEQ ID NO: 10879 - RNA, 20 nt, synthetic construct
  source 1..20: mol_type = other RNA
caggaatgcctagaatcaat

SEQ ID NO: 10880 - RNA, 20 nt, synthetic construct
  source 1..20: mol_type = other RNA
caggtaaaacctgtctaagg

SEQ ID NO: 10881 - RNA, 20 nt, synthetic construct
  source 1..20: mol_type = other RNA
caggttttacctgatataac

SEQ ID NO: 10882 - RNA, 20 nt, synthetic construct
  source 1..20: mol_type = other RNA
cagtagacatgaaaaacttg

SEQ ID NO: 10883 - RNA, 20 nt, synthetic construct
  source 1..20: mol_type = other RNA
catacaagtggcatgtatgc

SEQ ID NO: 10884 - RNA, 20 nt, synthetic construct
  source 1..20: mol_type = other RNA
catacatgccacttgtatgt

SEQ ID NO: 10885 - RNA, 20 nt, synthetic construct
  source 1..20: mol_type = other RNA
catcacagtagacatgaaaa

SEQ ID NO: 10886 - RNA, 20 nt, synthetic construct
  source 1..20: mol_type = other RNA
catcagacccagcaactctc

SEQ ID NO: 10887 - RNA, 20 nt, synthetic construct
  source 1..20: mol_type = other RNA
catgaaaaacttgagagttg

SEQ ID NO: 10888 - RNA, 20 nt, synthetic construct
  source 1..20: mol_type = other RNA
catgccacttgtatgttcac

SEQ ID NO: 10889 - RNA, 20 nt, synthetic construct
  source 1..20: mol_type = other RNA
catgtatgccatcagaccca

SEQ ID NO: 10890 - RNA, 20 nt, synthetic construct
  source 1..20: mol_type = other RNA
catgtctactgtgatgttat

SEQ ID NO: 10891 - RNA, 20 nt, synthetic construct
  source 1..20: mol_type = other RNA
cattcagcaggaatgcctag

SEQ ID NO: 10892 - RNA, 20 nt, synthetic construct
  source 1..20: mol_type = other RNA
cattcctgctgaatgtacca

SEQ ID NO: 10893 - RNA, 20 nt, synthetic construct
  source 1..20: mol_type = other RNA
catttataacagaggtgaac

SEQ ID NO: 10894 - RNA, 20 nt, synthetic construct
  source 1..20: mol_type = other RNA
cattttattgattctaggca

SEQ ID NO: 10895 - RNA, 20 nt, synthetic construct
  source 1..20: mol_type = other RNA
ccaccatttataacagaggt

SEQ ID NO: 10896 - RNA, 20 nt, synthetic construct
  source 1..20: mol_type = other RNA
ccacttgtatgttcacctct

SEQ ID NO: 10897 - RNA, 20 nt, synthetic construct
  source 1..20: mol_type = other RNA
ccagcaactctcaagttttt

SEQ ID NO: 10898 - RNA, 20 nt, synthetic construct
  source 1..20: mol_type = other RNA
ccatcagacccagcaactct

SEQ ID NO: 10899 - RNA, 20 nt, synthetic construct
  source 1..20: mol_type = other RNA
ccatttataacagaggtgaa

SEQ ID NO: 10900 - RNA, 20 nt, synthetic construct
  source 1..20: mol_type = other RNA
cccagcaactctcaagtttt

SEQ ID NO: 10901 - RNA, 20 nt, synthetic construct
  source 1..20: mol_type = other RNA
cctagaatcaataaaatgtt

SEQ ID NO: 10902 - RNA, 20 nt, synthetic construct
  source 1..20: mol_type = other RNA
cctctgttataaatggtggt

SEQ ID NO: 10903 - RNA, 20 nt, synthetic construct
  source 1..20: mol_type = other RNA
cctgatataacatcacagta

SEQ ID NO: 10904 - RNA, 20 nt, synthetic construct
  source 1..20: mol_type = other RNA
cctgctgaatgtaccaccat

SEQ ID NO: 10905 - RNA, 20 nt, synthetic construct
  source 1..20: mol_type = other RNA
ccttagacaggttttacctg

SEQ ID NO: 10906 - RNA, 20 nt, synthetic construct
  source 1..20: mol_type = other RNA
ctactgtgatgttatatcag

SEQ ID NO: 10907 - RNA, 20 nt, synthetic construct
  source 1..20: mol_type = other RNA
ctagaatcaataaaatgtta

SEQ ID NO: 10908 - RNA, 20 nt, synthetic construct
  source 1..20: mol_type = other RNA
ctaggcattcctgctgaatg

SEQ ID NO: 10909 - RNA, 20 nt, synthetic construct
  source 1..20: mol_type = other RNA
ctattctccttagacaggtt

SEQ ID NO: 10910 - RNA, 20 nt, synthetic construct
  source 1..20: mol_type = other RNA
ctcaagtttttcatgtctac

SEQ ID NO: 10911 - RNA, 20 nt, synthetic construct
  source 1..20: mol_type = other RNA
ctccttagacaggttttacc

SEQ ID NO: 10912 - RNA, 20 nt, synthetic construct
  source 1..20: mol_type = other RNA
ctctcaagtttttcatgtct

SEQ ID NO: 10913 - RNA, 20 nt, synthetic construct
  source 1..20: mol_type = other RNA
ctctgttataaatggtggta

SEQ ID NO: 10914 - RNA, 20 nt, synthetic construct
  source 1..20: mol_type = other RNA
ctgaatgtaccaccatttat

SEQ ID NO: 10915 - RNA, 20 nt, synthetic construct
  source 1..20: mol_type = other RNA
ctgatataacatcacagtag

SEQ ID NO: 10916 - RNA, 20 nt, synthetic construct
  source 1..20: mol_type = other RNA
ctgatggcatacatgccact

SEQ ID NO: 10917 - RNA, 20 nt, synthetic construct
  source 1..20: mol_type = other RNA
ctgatgtaataacattttat

SEQ ID NO: 10918 - RNA, 20 nt, synthetic construct
  source 1..20: mol_type = other RNA
ctgctgaatgtaccaccatt

SEQ ID NO: 10919 - RNA, 20 nt, synthetic construct
  source 1..20: mol_type = other RNA
ctgggtctgatggcatacat

SEQ ID NO: 10920 - RNA, 20 nt, synthetic construct
  source 1..20: mol_type = other RNA
ctgtctattctccttagaca

SEQ ID NO: 10921 - RNA, 20 nt, synthetic construct
  source 1..20: mol_type = other RNA
ctgtgatgttatatcaggta

SEQ ID NO: 10922 - RNA, 20 nt, synthetic construct
  source 1..20: mol_type = other RNA
ctgttataaatggtggtaca

SEQ ID NO: 10923 - RNA, 20 nt, synthetic construct
  source 1..20: mol_type = other RNA
cttagacaggttttacctga

SEQ ID NO: 10924 - RNA, 20 nt, synthetic construct
  source 1..20: mol_type = other RNA
cttgagagttgctgggtctg

SEQ ID NO: 10925 - RNA, 20 nt, synthetic construct
  source 1..20: mol_type = other RNA
cttgtatgttcacctctgtt

SEQ ID NO: 10926 - RNA, 20 nt, synthetic construct
  source 1..20: mol_type = other RNA
gaaaaacttgagagttgctg

SEQ ID NO: 10927 - RNA, 20 nt, synthetic construct
  source 1..20: mol_type = other RNA
gaacatacaagtggcatgta

SEQ ID NO: 10928 - RNA, 20 nt, synthetic construct
  source 1..20: mol_type = other RNA
gaatgcctagaatcaataaa

SEQ ID NO: 10929 - RNA, 20 nt, synthetic construct
  source 1..20: mol_type = other RNA
gaatgtaccaccatttataa

SEQ ID NO: 10930 - RNA, 20 nt, synthetic construct
  source 1..20: mol_type = other RNA
gacaggttttacctgatata

SEQ ID NO: 10931 - RNA, 20 nt, synthetic construct
  source 1..20: mol_type = other RNA
gacatgaaaaacttgagagt

SEQ ID NO: 10932 - RNA, 20 nt, synthetic construct
  source 1..20: mol_type = other RNA
gacccagcaactctcaagtt

SEQ ID NO: 10933 - RNA, 20 nt, synthetic construct
  source 1..20: mol_type = other RNA
gagagttgctgggtctgatg

SEQ ID NO: 10934 - RNA, 20 nt, synthetic construct
  source 1..20: mol_type = other RNA
gaggtgaacatacaagtggc

SEQ ID NO: 10935 - RNA, 20 nt, synthetic construct
  source 1..20: mol_type = other RNA
gagttgctgggtctgatggc

SEQ ID NO: 10936 - RNA, 20 nt, synthetic construct
  source 1..20: mol_type = other RNA
gatataacatcacagtagac

SEQ ID NO: 10937 - RNA, 20 nt, synthetic construct
  source 1..20: mol_type = other RNA
gatggcatacatgccacttg

SEQ ID NO: 10938 - RNA, 20 nt, synthetic construct
  source 1..20: mol_type = other RNA
gatgtaataacattttattg

SEQ ID NO: 10939 - RNA, 20 nt, synthetic construct
  source 1..20: mol_type = other RNA
gatgttatatcaggtaaaac

SEQ ID NO: 10940 - RNA, 20 nt, synthetic construct
  source 1..20: mol_type = other RNA
gattctaggcattcctgctg

SEQ ID NO: 10941 - RNA, 20 nt, synthetic construct
  source 1..20: mol_type = other RNA
gcaactctcaagtttttcat

SEQ ID NO: 10942 - RNA, 20 nt, synthetic construct
  source 1..20: mol_type = other RNA
gcaggaatgcctagaatcaa

SEQ ID NO: 10943 - RNA, 20 nt, synthetic construct
  source 1..20: mol_type = other RNA
gcatacatgccacttgtatg

SEQ ID NO: 10944 - RNA, 20 nt, synthetic construct
  source 1..20: mol_type = other RNA
gcatgtatgccatcagaccc

SEQ ID NO: 10945 - RNA, 20 nt, synthetic construct
  source 1..20: mol_type = other RNA
gcattcctgctgaatgtacc

SEQ ID NO: 10946 - RNA, 20 nt, synthetic construct
  source 1..20: mol_type = other RNA
gccacttgtatgttcacctc

SEQ ID NO: 10947 - RNA, 20 nt, synthetic construct
  source 1..20: mol_type = other RNA
gccatcagacccagcaactc

SEQ ID NO: 10948 - RNA, 20 nt, synthetic construct
  source 1..20: mol_type = other RNA
gcctagaatcaataaaatgt

SEQ ID NO: 10949 - RNA, 20 nt, synthetic construct
  source 1..20: mol_type = other RNA
gctgaatgtaccaccattta

SEQ ID NO: 10950 - RNA, 20 nt, synthetic construct
  source 1..20: mol_type = other RNA
gctgggtctgatggcataca

SEQ ID NO: 10951 - RNA, 20 nt, synthetic construct
  source 1..20: mol_type = other RNA
ggaatgcctagaatcaataa

SEQ ID NO: 10952 - RNA, 20 nt, synthetic construct
  source 1..20: mol_type = other RNA
ggcatacatgccacttgtat

SEQ ID NO: 10953 - RNA, 20 nt, synthetic construct
  source 1..20: mol_type = other RNA
ggcatgtatgccatcagacc

SEQ ID NO: 10954 - RNA, 20 nt, synthetic construct
  source 1..20: mol_type = other RNA
ggcattcctgctgaatgtac

SEQ ID NO: 10955 - RNA, 20 nt, synthetic construct
  source 1..20: mol_type = other RNA
gggtctgatggcatacatgc

SEQ ID NO: 10956 - RNA, 20 nt, synthetic construct
  source 1..20: mol_type = other RNA
ggtaaaacctgtctaaggag

SEQ ID NO: 10957 - RNA, 20 nt, synthetic construct
  source 1..20: mol_type = other RNA
ggtacattcagcaggaatgc

SEQ ID NO: 10958 - RNA, 20 nt, synthetic construct
  source 1..20: mol_type = other RNA
ggtctgatggcatacatgcc

SEQ ID NO: 10959 - RNA, 20 nt, synthetic construct
  source 1..20: mol_type = other RNA
ggtgaacatacaagtggcat

SEQ ID NO: 10960 - RNA, 20 nt, synthetic construct
  source 1..20: mol_type = other RNA
ggtggtacattcagcaggaa

SEQ ID NO: 10961 - RNA, 20 nt, synthetic construct
  source 1..20: mol_type = other RNA
ggttttacctgatataacat

SEQ ID NO: 10962 - RNA, 20 nt, synthetic construct
  source 1..20: mol_type = other RNA
gtaaaacctgtctaaggaga

SEQ ID NO: 10963 - RNA, 20 nt, synthetic construct
  source 1..20: mol_type = other RNA
gtacattcagcaggaatgcc

SEQ ID NO: 10964 - RNA, 20 nt, synthetic construct
  source 1..20: mol_type = other RNA
gtaccaccatttataacaga

SEQ ID NO: 10965 - RNA, 20 nt, synthetic construct
  source 1..20: mol_type = other RNA
gtagacatgaaaaacttgag

SEQ ID NO: 10966 - RNA, 20 nt, synthetic construct
  source 1..20: mol_type = other RNA
gtatgccatcagacccagca

SEQ ID NO: 10967 - RNA, 20 nt, synthetic construct
  source 1..20: mol_type = other RNA
gtatgttcacctctgttata

SEQ ID NO: 10968 - RNA, 20 nt, synthetic construct
  source 1..20: mol_type = other RNA
gtctactgtgatgttatatc

SEQ ID NO: 10969 - RNA, 20 nt, synthetic construct
  source 1..20: mol_type = other RNA
gtctattctccttagacagg

SEQ ID NO: 10970 - RNA, 20 nt, synthetic construct
  source 1..20: mol_type = other RNA
gtctgatggcatacatgcca

SEQ ID NO: 10971 - RNA, 20 nt, synthetic construct
  source 1..20: mol_type = other RNA
gtgaacatacaagtggcatg

SEQ ID NO: 10972 - RNA, 20 nt, synthetic construct
  source 1..20: mol_type = other RNA
gtgatgttatatcaggtaaa

SEQ ID NO: 10973 - RNA, 20 nt, synthetic construct
  source 1..20: mol_type = other RNA
gtggcatgtatgccatcaga

SEQ ID NO: 10974 - RNA, 20 nt, synthetic construct
  source 1..20: mol_type = other RNA
gtggtacattcagcaggaat

SEQ ID NO: 10975 - RNA, 20 nt, synthetic construct
  source 1..20: mol_type = other RNA
gttataaatggtggtacatt

SEQ ID NO: 10976 - RNA, 20 nt, synthetic construct
  source 1..20: mol_type = other RNA
gttatatcaggtaaaacctg

SEQ ID NO: 10977 - RNA, 20 nt, synthetic construct
  source 1..20: mol_type = other RNA
gttcacctctgttataaatg

SEQ ID NO: 10978 - RNA, 20 nt, synthetic construct
  source 1..20: mol_type = other RNA
gttgctgggtctgatggcat

SEQ ID NO: 10979 - RNA, 20 nt, synthetic construct
  source 1..20: mol_type = other RNA
gttttacctgatataacatc

SEQ ID NO: 10980 - RNA, 20 nt, synthetic construct
  source 1..20: mol_type = other RNA
gtttttcatgtctactgtga

SEQ ID NO: 10981 - RNA, 20 nt, synthetic construct
  source 1..20: mol_type = other RNA
taaaacctgtctaaggagaa

SEQ ID NO: 10982 - RNA, 20 nt, synthetic construct
  source 1..20: mol_type = other RNA
taaatggtggtacattcagc

SEQ ID NO: 10983 - RNA, 20 nt, synthetic construct
  source 1..20: mol_type = other RNA
taacagaggtgaacatacaa

SEQ ID NO: 10984 - RNA, 20 nt, synthetic construct
  source 1..20: mol_type = other RNA
taacatcacagtagacatga

SEQ ID NO: 10985 - RNA, 20 nt, synthetic construct
  source 1..20: mol_type = other RNA
taacattttattgattctag

SEQ ID NO: 10986 - RNA, 20 nt, synthetic construct
  source 1..20: mol_type = other RNA
tacaagtggcatgtatgcca

SEQ ID NO: 10987 - RNA, 20 nt, synthetic construct
  source 1..20: mol_type = other RNA
tacatgccacttgtatgttc

SEQ ID NO: 10988 - RNA, 20 nt, synthetic construct
  source 1..20: mol_type = other RNA
tacattcagcaggaatgcct

SEQ ID NO: 10989 - RNA, 20 nt, synthetic construct
  source 1..20: mol_type = other RNA
taccaccatttataacagag

SEQ ID NO: 10990 - RNA, 20 nt, synthetic construct
  source 1..20: mol_type = other RNA
tacctgatataacatcacag

SEQ ID NO: 10991 - RNA, 20 nt, synthetic construct
  source 1..20: mol_type = other RNA
tactgtctattctccttaga

SEQ ID NO: 10992 - RNA, 20 nt, synthetic construct
  source 1..20: mol_type = other RNA
tactgtgatgttatatcagg

SEQ ID NO: 10993 - RNA, 20 nt, synthetic construct
  source 1..20: mol_type = other RNA
tagacaggttttacctgata

SEQ ID NO: 10994 - RNA, 20 nt, synthetic construct
  source 1..20: mol_type = other RNA
tagacatgaaaaacttgaga

SEQ ID NO: 10995 - RNA, 20 nt, synthetic construct
  source 1..20: mol_type = other RNA
taggcattcctgctgaatgt

SEQ ID NO: 10996 - RNA, 20 nt, synthetic construct
  source 1..20: mol_type = other RNA
tataaatggtggtacattca

SEQ ID NO: 10997 - RNA, 20 nt, synthetic construct
  source 1..20: mol_type = other RNA
tataacagaggtgaacatac

SEQ ID NO: 10998 - RNA, 20 nt, synthetic construct
  source 1..20: mol_type = other RNA
tataacatcacagtagacat

SEQ ID NO: 10999 - RNA, 20 nt, synthetic construct
  source 1..20: mol_type = other RNA
tatatcaggtaaaacctgtc

SEQ ID NO: 11000 - RNA, 20 nt, synthetic construct
  source 1..20: mol_type = other RNA
tatcaggtaaaacctgtcta

SEQ ID NO: 11001 - RNA, 20 nt, synthetic construct
  source 1..20: mol_type = other RNA
tatgccatcagacccagcaa

SEQ ID NO: 11002 - RNA, 20 nt, synthetic construct
  source 1..20: mol_type = other RNA
tatgttcacctctgttataa

SEQ ID NO: 11003 - RNA, 20 nt, synthetic construct
  source 1..20: mol_type = other RNA
tattctccttagacaggttt

SEQ ID NO: 11004 - RNA, 20 nt, synthetic construct
  source 1..20: mol_type = other RNA
tattgattctaggcattcct

SEQ ID NO: 11005 - RNA, 20 nt, synthetic construct
  source 1..20: mol_type = other RNA
tcaagtttttcatgtctact

SEQ ID NO: 11006 - RNA, 20 nt, synthetic construct
  source 1..20: mol_type = other RNA
tcacagtagacatgaaaaac

SEQ ID NO: 11007 - RNA, 20 nt, synthetic construct
  source 1..20: mol_type = other RNA
tcacctctgttataaatggt

SEQ ID NO: 11008 - RNA, 20 nt, synthetic construct
  source 1..20: mol_type = other RNA
tcagacccagcaactctcaa

SEQ ID NO: 11009 - RNA, 20 nt, synthetic construct
  source 1..20: mol_type = other RNA
tcagcaggaatgcctagaat

SEQ ID NO: 11010 - RNA, 20 nt, synthetic construct
  source 1..20: mol_type = other RNA
tcaggtaaaacctgtctaag

SEQ ID NO: 11011 - RNA, 20 nt, synthetic construct
  source 1..20: mol_type = other RNA
tcatgtctactgtgatgtta

SEQ ID NO: 11012 - RNA, 20 nt, synthetic construct
  source 1..20: mol_type = other RNA
tcctgctgaatgtaccacca

SEQ ID NO: 11013 - RNA, 20 nt, synthetic construct
  source 1..20: mol_type = other RNA
tccttagacaggttttacct

SEQ ID NO: 11014 - RNA, 20 nt, synthetic construct
  source 1..20: mol_type = other RNA
tctactgtgatgttatatca

SEQ ID NO: 11015 - RNA, 20 nt, synthetic construct
  source 1..20: mol_type = other RNA
tctaggcattcctgctgaat

SEQ ID NO: 11016 - RNA, 20 nt, synthetic construct
  source 1..20: mol_type = other RNA
tctattctccttagacaggt

SEQ ID NO: 11017 - RNA, 20 nt, synthetic construct
  source 1..20: mol_type = other RNA
tctcaagtttttcatgtcta

SEQ ID NO: 11018 - RNA, 20 nt, synthetic construct
  source 1..20: mol_type = other RNA
tctccttagacaggttttac

SEQ ID NO: 11019 - RNA, 20 nt, synthetic construct
  source 1..20: mol_type = other RNA
tctgatggcatacatgccac

SEQ ID NO: 11020 - RNA, 20 nt, synthetic construct
  source 1..20: mol_type = other RNA
tctgatgtaataacatttta

SEQ ID NO: 11021 - RNA, 20 nt, synthetic construct
  source 1..20: mol_type = other RNA
tctgttataaatggtggtac

SEQ ID NO: 11022 - RNA, 20 nt, synthetic construct
  source 1..20: mol_type = other RNA
tgaaaaacttgagagttgct

SEQ ID NO: 11023 - RNA, 20 nt, synthetic construct
  source 1..20: mol_type = other RNA
tgaacatacaagtggcatgt

SEQ ID NO: 11024 - RNA, 20 nt, synthetic construct
  source 1..20: mol_type = other RNA
tgaatgtaccaccatttata

SEQ ID NO: 11025 - RNA, 20 nt, synthetic construct
  source 1..20: mol_type = other RNA
tgagagttgctgggtctgat

SEQ ID NO: 11026 - RNA, 20 nt, synthetic construct
  source 1..20: mol_type = other RNA
tgatataacatcacagtaga

SEQ ID NO: 11027 - RNA, 20 nt, synthetic construct
  source 1..20: mol_type = other RNA
tgatggcatacatgccactt

SEQ ID NO: 11028 - RNA, 20 nt, synthetic construct
  source 1..20: mol_type = other RNA
tgatgttatatcaggtaaaa

SEQ ID NO: 11029 - RNA, 20 nt, synthetic construct
  source 1..20: mol_type = other RNA
tgattctaggcattcctgct

SEQ ID NO: 11030 - RNA, 20 nt, synthetic construct
  source 1..20: mol_type = other RNA
tgccacttgtatgttcacct

SEQ ID NO: 11031 - RNA, 20 nt, synthetic construct
  source 1..20: mol_type = other RNA
tgccatcagacccagcaact

SEQ ID NO: 11032 - RNA, 20 nt, synthetic construct
  source 1..20: mol_type = other RNA
tgcctagaatcaataaaatg

SEQ ID NO: 11033 - RNA, 20 nt, synthetic construct
  source 1..20: mol_type = other RNA
tgctgaatgtaccaccattt

SEQ ID NO: 11034 - RNA, 20 nt, synthetic construct
  source 1..20: mol_type = other RNA
tgctgggtctgatggcatac

SEQ ID NO: 11035 - RNA, 20 nt, synthetic construct
  source 1..20: mol_type = other RNA
tggcatacatgccacttgta

SEQ ID NO: 11036 - RNA, 20 nt, synthetic construct
  source 1..20: mol_type = other RNA
tggcatgtatgccatcagac

SEQ ID NO: 11037 - RNA, 20 nt, synthetic construct
  source 1..20: mol_type = other RNA
tgggtctgatggcatacatg

SEQ ID NO: 11038 - RNA, 20 nt, synthetic construct
  source 1..20: mol_type = other RNA
tggtacattcagcaggaatg

SEQ ID NO: 11039 - RNA, 20 nt, synthetic construct
  source 1..20: mol_type = other RNA
tggtggtacattcagcagga

SEQ ID NO: 11040 - RNA, 20 nt, synthetic construct
  source 1..20: mol_type = other RNA
tgtaccaccatttataacag

SEQ ID NO: 11041 - RNA, 20 nt, synthetic construct
  source 1..20: mol_type = other RNA
tgtatgccatcagacccagc

SEQ ID NO: 11042 - RNA, 20 nt, synthetic construct
  source 1..20: mol_type = other RNA
tgtatgttcacctctgttat

SEQ ID NO: 11043 - RNA, 20 nt, synthetic construct
  source 1..20: mol_type = other RNA
tgtctactgtgatgttatat

SEQ ID NO: 11044 - RNA, 20 nt, synthetic construct
  source 1..20: mol_type = other RNA
tgtctattctccttagacag

SEQ ID NO: 11045 - RNA, 20 nt, synthetic construct
  source 1..20: mol_type = other RNA
tgtgatgttatatcaggtaa

SEQ ID NO: 11046 - RNA, 20 nt, synthetic construct
  source 1..20: mol_type = other RNA
tgttataaatggtggtacat

SEQ ID NO: 11047 - RNA, 20 nt, synthetic construct
  source 1..20: mol_type = other RNA
tgttatatcaggtaaaacct

SEQ ID NO: 11048 - RNA, 20 nt, synthetic construct
  source 1..20: mol_type = other RNA
tgttcacctctgttataaat

SEQ ID NO: 11049 - RNA, 20 nt, synthetic construct
  source 1..20: mol_type = other RNA
ttacctgatataacatcaca

SEQ ID NO: 11050 - RNA, 20 nt, synthetic construct
  source 1..20: mol_type = other RNA
ttagacaggttttacctgat

SEQ ID NO: 11051 - RNA, 20 nt, synthetic construct
  source 1..20: mol_type = other RNA
ttataaatggtggtacattc

SEQ ID NO: 11052 - RNA, 20 nt, synthetic construct
  source 1..20: mol_type = other RNA
ttataacagaggtgaacata

SEQ ID NO: 11053 - RNA, 20 nt, synthetic construct
  source 1..20: mol_type = other RNA
ttatatcaggtaaaacctgt

SEQ ID NO: 11054 - RNA, 20 nt, synthetic construct
  source 1..20: mol_type = other RNA
ttattgattctaggcattcc

SEQ ID NO: 11055 - RNA, 20 nt, synthetic construct
  source 1..20: mol_type = other RNA
ttcacctctgttataaatgg

SEQ ID NO: 11056 - RNA, 20 nt, synthetic construct
  source 1..20: mol_type = other RNA
ttcagcaggaatgcctagaa

SEQ ID NO: 11057 - RNA, 20 nt, synthetic construct
  source 1..20: mol_type = other RNA
ttcatgtctactgtgatgtt

SEQ ID NO: 11058 - RNA, 20 nt, synthetic construct
  source 1..20: mol_type = other RNA
ttcctgctgaatgtaccacc

SEQ ID NO: 11059 - RNA, 20 nt, synthetic construct
  source 1..20: mol_type = other RNA
ttctaggcattcctgctgaa

SEQ ID NO: 11060 - RNA, 20 nt, synthetic construct
  source 1..20: mol_type = other RNA
ttctccttagacaggtttta

SEQ ID NO: 11061 - RNA, 20 nt, synthetic construct
  source 1..20: mol_type = other RNA
ttgagagttgctgggtctga

SEQ ID NO: 11062 - RNA, 20 nt, synthetic construct
  source 1..20: mol_type = other RNA
ttgattctaggcattcctgc

SEQ ID NO: 11063 - RNA, 20 nt, synthetic construct
  source 1..20: mol_type = other RNA
ttgctgggtctgatggcata

SEQ ID NO: 11064 - RNA, 20 nt, synthetic construct
  source 1..20: mol_type = other RNA
ttgtatgttcacctctgtta

SEQ ID NO: 11065 - RNA, 20 nt, synthetic construct
  source 1..20: mol_type = other RNA
tttacctgatataacatcac

SEQ ID NO: 11066 - RNA, 20 nt, synthetic construct
  source 1..20: mol_type = other RNA
tttataacagaggtgaacat

SEQ ID NO: 11067 - RNA, 20 nt, synthetic construct
  source 1..20: mol_type = other RNA
tttattgattctaggcattc

SEQ ID NO: 11068 - RNA, 20 nt, synthetic construct
  source 1..20: mol_type = other RNA
tttcatgtctactgtgatgt

SEQ ID NO: 11069 - RNA, 20 nt, synthetic construct
  source 1..20: mol_type = other RNA
ttttacctgatataacatca

SEQ ID NO: 11070 - RNA, 20 nt, synthetic construct
  source 1..20: mol_type = other RNA
ttttattgattctaggcatt

SEQ ID NO: 11071 - RNA, 20 nt, synthetic construct
  source 1..20: mol_type = other RNA
ttttcatgtctactgtgatg

SEQ ID NO: 11072 - RNA, 20 nt, synthetic construct
  source 1..20: mol_type = other RNA
tttttcatgtctactgtgat

SEQ ID NO: 11073 - RNA, 21 nt, synthetic construct
  source 1..21: mol_type = other RNA
aaaaacttgagagttgctggg

SEQ ID NO: 11074 - RNA, 21 nt, synthetic construct
  source 1..21: mol_type = other RNA
aaaacttgagagttgctgggt

SEQ ID NO: 11075 - RNA, 21 nt, synthetic construct
  source 1..21: mol_type = other RNA
aaacttgagagttgctgggtc

SEQ ID NO: 11076 - RNA, 21 nt, synthetic construct
  source 1..21: mol_type = other RNA
aaatggtggtacattcagcag

SEQ ID NO: 11077 - RNA, 21 nt, synthetic construct
  source 1..21: mol_type = other RNA
aacagaggtgaacatacaagt

SEQ ID NO: 11078 - RNA, 21 nt, synthetic construct
  source 1..21: mol_type = other RNA
aacatacaagtggcatgtatg

SEQ ID NO: 11079 - RNA, 21 nt, synthetic construct
  source 1..21: mol_type = other RNA
aacatcacagtagacatgaaa

SEQ ID NO: 11080 - RNA, 21 nt, synthetic construct
  source 1..21: mol_type = other RNA
aacattttattgattctaggc

SEQ ID NO: 11081 - RNA, 21 nt, synthetic construct
  source 1..21: mol_type = other RNA
aactctcaagtttttcatgtc

SEQ ID NO: 11082 - RNA, 21 nt, synthetic construct
  source 1..21: mol_type = other RNA
aacttgagagttgctgggtct

SEQ ID NO: 11083 - RNA, 21 nt, synthetic construct
  source 1..21: mol_type = other RNA
aagtggcatgtatgccatcag

SEQ ID NO: 11084 - RNA, 21 nt, synthetic construct
  source 1..21: mol_type = other RNA
aagtttttcatgtctactgtg

SEQ ID NO: 11085 - RNA, 21 nt, synthetic construct
  source 1..21: mol_type = other RNA
aatgcctagaatcaataaaat

SEQ ID NO: 11086 - RNA, 21 nt, synthetic construct
  source 1..21: mol_type = other RNA
aatggtggtacattcagcagg

SEQ ID NO: 11087 - RNA, 21 nt, synthetic construct
  source 1..21: mol_type = other RNA
aatgtaccaccatttataaca

SEQ ID NO: 11088 - RNA, 21 nt, synthetic construct
  source 1..21: mol_type = other RNA
acaagtggcatgtatgccatc

SEQ ID NO: 11089 - RNA, 21 nt, synthetic construct
  source 1..21: mol_type = other RNA
acagaggtgaacatacaagtg

SEQ ID NO: 11090 - RNA, 21 nt, synthetic construct
  source 1..21: mol_type = other RNA
acaggttttacctgatataac

SEQ ID NO: 11091 - RNA, 21 nt, synthetic construct
  source 1..21: mol_type = other RNA
acagtagacatgaaaaacttg

SEQ ID NO: 11092 - RNA, 21 nt, synthetic construct
  source 1..21: mol_type = other RNA
acatacaagtggcatgtatgc

SEQ ID NO: 11093 - RNA, 21 nt, synthetic construct
  source 1..21: mol_type = other RNA
acatcacagtagacatgaaaa

SEQ ID NO: 11094 - RNA, 21 nt, synthetic construct
  source 1..21: mol_type = other RNA
acatgaaaaacttgagagttg

SEQ ID NO: 11095 - RNA, 21 nt, synthetic construct
  source 1..21: mol_type = other RNA
acatgccacttgtatgttcac

SEQ ID NO: 11096 - RNA, 21 nt, synthetic construct
  source 1..21: mol_type = other RNA
acattcagcaggaatgcctag

SEQ ID NO: 11097 - RNA, 21 nt, synthetic construct
  source 1..21: mol_type = other RNA
acattttattgattctaggca

SEQ ID NO: 11098 - RNA, 21 nt, synthetic construct
  source 1..21: mol_type = other RNA
accaccatttataacagaggt

SEQ ID NO: 11099 - RNA, 21 nt, synthetic construct
  source 1..21: mol_type = other RNA
accatttataacagaggtgaa

SEQ ID NO: 11100 - RNA, 21 nt, synthetic construct
  source 1..21: mol_type = other RNA
acccagcaactctcaagtttt

SEQ ID NO: 11101 - RNA, 21 nt, synthetic construct
  source 1..21: mol_type = other RNA
acctctgttataaatggtggt

SEQ ID NO: 11102 - RNA, 21 nt, synthetic construct
  source 1..21: mol_type = other RNA
acctgatataacatcacagta

SEQ ID NO: 11103 - RNA, 21 nt, synthetic construct
  source 1..21: mol_type = other RNA
actctcaagtttttcatgtct

SEQ ID NO: 11104 - RNA, 21 nt, synthetic construct
  source 1..21: mol_type = other RNA
actgtctattctccttagaca

SEQ ID NO: 11105 - RNA, 21 nt, synthetic construct
  source 1..21: mol_type = other RNA
actgtgatgttatatcaggta

SEQ ID NO: 11106 - RNA, 21 nt, synthetic construct
  source 1..21: mol_type = other RNA
acttgagagttgctgggtctg

SEQ ID NO: 11107 - RNA, 21 nt, synthetic construct
  source 1..21: mol_type = other RNA
acttgtatgttcacctctgtt

SEQ ID NO: 11108 - RNA, 21 nt, synthetic construct
  source 1..21: mol_type = other RNA
agacaggttttacctgatata

SEQ ID NO: 11109 - RNA, 21 nt, synthetic construct
  source 1..21: mol_type = other RNA
agacatgaaaaacttgagagt

SEQ ID NO: 11110 - RNA, 21 nt, synthetic construct
  source 1..21: mol_type = other RNA
agacccagcaactctcaagtt

SEQ ID NO: 11111 - RNA, 21 nt, synthetic construct
  source 1..21: mol_type = other RNA
agaggtgaacatacaagtggc

SEQ ID NO: 11112 - RNA, 21 nt, synthetic construct
  source 1..21: mol_type = other RNA
agagttgctgggtctgatggc

SEQ ID NO: 11113 - RNA, 21 nt, synthetic construct
  source 1..21: mol_type = other RNA
agcaactctcaagtttttcat

SEQ ID NO: 11114 - RNA, 21 nt, synthetic construct
  source 1..21: mol_type = other RNA
agcaggaatgcctagaatcaa

SEQ ID NO: 11115 - RNA, 21 nt, synthetic construct
  source 1..21: mol_type = other RNA
aggaatgcctagaatcaataa

SEQ ID NO: 11116 - RNA, 21 nt, synthetic construct
  source 1..21: mol_type = other RNA
aggcattcctgctgaatgtac

SEQ ID NO: 11117 - RNA, 21 nt, synthetic construct
  source 1..21: mol_type = other RNA
aggtaaaacctgtctaaggag

SEQ ID NO: 11118 - RNA, 21 nt, synthetic construct
  source 1..21: mol_type = other RNA
aggtgaacatacaagtggcat

SEQ ID NO: 11119 - RNA, 21 nt, synthetic construct
  source 1..21: mol_type = other RNA
aggttttacctgatataacat

SEQ ID NO: 11120 - RNA, 21 nt, synthetic construct
  source 1..21: mol_type = other RNA
agtagacatgaaaaacttgag

SEQ ID NO: 11121 - RNA, 21 nt, synthetic construct
  source 1..21: mol_type = other RNA
agtggcatgtatgccatcaga

SEQ ID NO: 11122 - RNA, 21 nt, synthetic construct
  source 1..21: mol_type = other RNA
agttgctgggtctgatggcat

SEQ ID NO: 11123 - RNA, 21 nt, synthetic construct
  source 1..21: mol_type = other RNA
agtttttcatgtctactgtga

SEQ ID NO: 11124 - RNA, 21 nt, synthetic construct
  source 1..21: mol_type = other RNA
ataaatggtggtacattcagc

SEQ ID NO: 11125 - RNA, 21 nt, synthetic construct
  source 1..21: mol_type = other RNA
ataacagaggtgaacatacaa

SEQ ID NO: 11126 - RNA, 21 nt, synthetic construct
  source 1..21: mol_type = other RNA
ataacatcacagtagacatga

SEQ ID NO: 11127 - RNA, 21 nt, synthetic construct
  source 1..21: mol_type = other RNA
atacaagtggcatgtatgcca

SEQ ID NO: 11128 - RNA, 21 nt, synthetic construct
  source 1..21: mol_type = other RNA
atacatgccacttgtatgttc

SEQ ID NO: 11129 - RNA, 21 nt, synthetic construct
  source 1..21: mol_type = other RNA
atataacatcacagtagacat

SEQ ID NO: 11130 - RNA, 21 nt, synthetic construct
  source 1..21: mol_type = other RNA
atatcaggtaaaacctgtcta

SEQ ID NO: 11131 - RNA, 21 nt, synthetic construct
  source 1..21: mol_type = other RNA
atcacagtagacatgaaaaac

SEQ ID NO: 11132 - RNA, 21 nt, synthetic construct
  source 1..21: mol_type = other RNA
atcagacccagcaactctcaa

SEQ ID NO: 11133 - RNA, 21 nt, synthetic construct
  source 1..21: mol_type = other RNA
atcaggtaaaacctgtctaag

SEQ ID NO: 11134 - RNA, 21 nt, synthetic construct
  source 1..21: mol_type = other RNA
atgaaaaacttgagagttgct

SEQ ID NO: 11135 - RNA, 21 nt, synthetic construct
  source 1..21: mol_type = other RNA
atgccacttgtatgttcacct

SEQ ID NO: 11136 - RNA, 21 nt, synthetic construct
  source 1..21: mol_type = other RNA
atgccatcagacccagcaact

SEQ ID NO: 11137 - RNA, 21 nt, synthetic construct
  source 1..21: mol_type = other RNA
atgcctagaatcaataaaatg

SEQ ID NO: 11138 - RNA, 21 nt, synthetic construct
  source 1..21: mol_type = other RNA
atggcatacatgccacttgta

SEQ ID NO: 11139 - RNA, 21 nt, synthetic construct
  source 1..21: mol_type = other RNA
atggtggtacattcagcagga

SEQ ID NO: 11140 - RNA, 21 nt, synthetic construct
  source 1..21: mol_type = other RNA
atgtaccaccatttataacag

SEQ ID NO: 11141 - RNA, 21 nt, synthetic construct
  source 1..21: mol_type = other RNA
atgtatgccatcagacccagc

SEQ ID NO: 11142 - RNA, 21 nt, synthetic construct
  source 1..21: mol_type = other RNA
atgtctactgtgatgttatat

SEQ ID NO: 11143 - RNA, 21 nt, synthetic construct
  source 1..21: mol_type = other RNA
atgttatatcaggtaaaacct

SEQ ID NO: 11144 - RNA, 21 nt, synthetic construct
  source 1..21: mol_type = other RNA
atgttcacctctgttataaat

SEQ ID NO: 11145 - RNA, 21 nt, synthetic construct
  source 1..21: mol_type = other RNA
attcagcaggaatgcctagaa

SEQ ID NO: 11146 - RNA, 21 nt, synthetic construct
  source 1..21: mol_type = other RNA
attcctgctgaatgtaccacc

SEQ ID NO: 11147 - RNA, 21 nt, synthetic construct
  source 1..21: mol_type = other RNA
attctaggcattcctgctgaa

SEQ ID NO: 11148 - RNA, 21 nt, synthetic construct
  source 1..21: mol_type = other RNA
attctccttagacaggtttta

SEQ ID NO: 11149 - RNA, 21 nt, synthetic construct
  source 1..21: mol_type = other RNA
attgattctaggcattcctgc

SEQ ID NO: 11150 - RNA, 21 nt, synthetic construct
  source 1..21: mol_type = other RNA
atttataacagaggtgaacat

SEQ ID NO: 11151 - RNA, 21 nt, synthetic construct
  source 1..21: mol_type = other RNA
attttattgattctaggcatt

SEQ ID NO: 11152 - RNA, 21 nt, synthetic construct
  source 1..21: mol_type = other RNA
caactctcaagtttttcatgt

SEQ ID NO: 11153 - RNA, 21 nt, synthetic construct
  source 1..21: mol_type = other RNA
caagtggcatgtatgccatca

SEQ ID NO: 11154 - RNA, 21 nt, synthetic construct
  source 1..21: mol_type = other RNA
caagtttttcatgtctactgt

SEQ ID NO: 11155 - RNA, 21 nt, synthetic construct
  source 1..21: mol_type = other RNA
cacagtagacatgaaaaactt

SEQ ID NO: 11156 - RNA, 21 nt, synthetic construct
  source 1..21: mol_type = other RNA
caccatttataacagaggtga

SEQ ID NO: 11157 - RNA, 21 nt, synthetic construct
  source 1..21: mol_type = other RNA
cacctctgttataaatggtgg

SEQ ID NO: 11158 - RNA, 21 nt, synthetic construct
  source 1..21: mol_type = other RNA
cacttgtatgttcacctctgt

SEQ ID NO: 11159 - RNA, 21 nt, synthetic construct
  source 1..21: mol_type = other RNA
cagacccagcaactctcaagt

SEQ ID NO: 11160 - RNA, 21 nt, synthetic construct
  source 1..21: mol_type = other RNA
cagaggtgaacatacaagtgg

SEQ ID NO: 11161 - RNA, 21 nt, synthetic construct
  source 1..21: mol_type = other RNA
cagcaactctcaagtttttca

SEQ ID NO: 11162 - RNA, 21 nt, synthetic construct
  source 1..21: mol_type = other RNA
cagcaggaatgcctagaatca

SEQ ID NO: 11163 - RNA, 21 nt, synthetic construct
  source 1..21: mol_type = other RNA
caggaatgcctagaatcaata

SEQ ID NO: 11164 - RNA, 21 nt, synthetic construct
  source 1..21: mol_type = other RNA
caggtaaaacctgtctaagga

SEQ ID NO: 11165 - RNA, 21 nt, synthetic construct
  source 1..21: mol_type = other RNA
caggttttacctgatataaca

SEQ ID NO: 11166 - RNA, 21 nt, synthetic construct
  source 1..21: mol_type = other RNA
cagtagacatgaaaaacttga

SEQ ID NO: 11167 - RNA, 21 nt, synthetic construct
  source 1..21: mol_type = other RNA
catacaagtggcatgtatgcc

SEQ ID NO: 11168 - RNA, 21 nt, synthetic construct
  source 1..21: mol_type = other RNA
catacatgccacttgtatgtt

SEQ ID NO: 11169 - RNA, 21 nt, synthetic construct
  source 1..21: mol_type = other RNA
catcacagtagacatgaaaaa

SEQ ID NO: 11170 - RNA, 21 nt, synthetic construct
  source 1..21: mol_type = other RNA
catcagacccagcaactctca

SEQ ID NO: 11171 - RNA, 21 nt, synthetic construct
  source 1..21: mol_type = other RNA
catgaaaaacttgagagttgc

SEQ ID NO: 11172 - RNA, 21 nt, synthetic construct
  source 1..21: mol_type = other RNA
catgccacttgtatgttcacc

SEQ ID NO: 11173 - RNA, 21 nt, synthetic construct
  source 1..21: mol_type = other RNA
catgtatgccatcagacccag

SEQ ID NO: 11174 - RNA, 21 nt, synthetic construct
  source 1..21: mol_type = other RNA
catgtctactgtgatgttata

SEQ ID NO: 11175 - RNA, 21 nt, synthetic construct
  source 1..21: mol_type = other RNA
cattcagcaggaatgcctaga

SEQ ID NO: 11176 - RNA, 21 nt, synthetic construct
  source 1..21: mol_type = other RNA
cattcctgctgaatgtaccac

SEQ ID NO: 11177 - RNA, 21 nt, synthetic construct
  source 1..21: mol_type = other RNA
catttataacagaggtgaaca

SEQ ID NO: 11178 - RNA, 21 nt, synthetic construct
  source 1..21: mol_type = other RNA
cattttattgattctaggcat

SEQ ID NO: 11179 - RNA, 21 nt, synthetic construct
  source 1..21: mol_type = other RNA
ccaccatttataacagaggtg

SEQ ID NO: 11180 - RNA, 21 nt, synthetic construct
  source 1..21: mol_type = other RNA
ccacttgtatgttcacctctg

SEQ ID NO: 11181 - RNA, 21 nt, synthetic construct
  source 1..21: mol_type = other RNA
ccagcaactctcaagtttttc

SEQ ID NO: 11182 - RNA, 21 nt, synthetic construct
  source 1..21: mol_type = other RNA
ccatcagacccagcaactctc

SEQ ID NO: 11183 - RNA, 21 nt, synthetic construct
  source 1..21: mol_type = other RNA
ccatttataacagaggtgaac

SEQ ID NO: 11184 - RNA, 21 nt, synthetic construct
  source 1..21: mol_type = other RNA
cccagcaactctcaagttttt

SEQ ID NO: 11185 - RNA, 21 nt, synthetic construct
  source 1..21: mol_type = other RNA
cctagaatcaataaaatgtta

SEQ ID NO: 11186 - RNA, 21 nt, synthetic construct
  source 1..21: mol_type = other RNA
cctctgttataaatggtggta

SEQ ID NO: 11187 - RNA, 21 nt, synthetic construct
  source 1..21: mol_type = other RNA
cctgatataacatcacagtag

SEQ ID NO: 11188 - RNA, 21 nt, synthetic construct
  source 1..21: mol_type = other RNA
cctgctgaatgtaccaccatt

SEQ ID NO: 11189 - RNA, 21 nt, synthetic construct
  source 1..21: mol_type = other RNA
ccttagacaggttttacctga

SEQ ID NO: 11190 - RNA, 21 nt, synthetic construct
  source 1..21: mol_type = other RNA
ctactgtgatgttatatcagg

SEQ ID NO: 11191 - RNA, 21 nt, synthetic construct
  source 1..21: mol_type = other RNA
ctaggcattcctgctgaatgt

SEQ ID NO: 11192 - RNA, 21 nt, synthetic construct
  source 1..21: mol_type = other RNA
ctattctccttagacaggttt

SEQ ID NO: 11193 - RNA, 21 nt, synthetic construct
  source 1..21: mol_type = other RNA
ctcaagtttttcatgtctact

SEQ ID NO: 11194 - RNA, 21 nt, synthetic construct
  source 1..21: mol_type = other RNA
ctccttagacaggttttacct

SEQ ID NO: 11195 - RNA, 21 nt, synthetic construct
  source 1..21: mol_type = other RNA
ctctcaagtttttcatgtcta

SEQ ID NO: 11196 - RNA, 21 nt, synthetic construct
  source 1..21: mol_type = other RNA
ctctgttataaatggtggtac

SEQ ID NO: 11197 - RNA, 21 nt, synthetic construct
  source 1..21: mol_type = other RNA
ctgaatgtaccaccatttata

SEQ ID NO: 11198 - RNA, 21 nt, synthetic construct
  source 1..21: mol_type = other RNA
ctgatataacatcacagtaga

SEQ ID NO: 11199 - RNA, 21 nt, synthetic construct
  source 1..21: mol_type = other RNA
ctgatggcatacatgccactt

SEQ ID NO: 11200 - RNA, 21 nt, synthetic construct
  source 1..21: mol_type = other RNA
ctgctgaatgtaccaccattt

SEQ ID NO: 11201 - RNA, 21 nt, synthetic construct
  source 1..21: mol_type = other RNA
ctgggtctgatggcatacatg

SEQ ID NO: 11202 - RNA, 21 nt, synthetic construct
  source 1..21: mol_type = other RNA
ctgtctattctccttagacag

SEQ ID NO: 11203 - RNA, 21 nt, synthetic construct
  source 1..21: mol_type = other RNA
ctgtgatgttatatcaggtaa

SEQ ID NO: 11204 - RNA, 21 nt, synthetic construct
  source 1..21: mol_type = other RNA
ctgttataaatggtggtacat

SEQ ID NO: 11205 - RNA, 21 nt, synthetic construct
  source 1..21: mol_type = other RNA
cttagacaggttttacctgat

SEQ ID NO: 11206 - RNA, 21 nt, synthetic construct
  source 1..21: mol_type = other RNA
cttgagagttgctgggtctga

SEQ ID NO: 11207 - RNA, 21 nt, synthetic construct
  source 1..21: mol_type = other RNA
cttgtatgttcacctctgtta

SEQ ID NO: 11208 - RNA, 21 nt, synthetic construct
  source 1..21: mol_type = other RNA
gaaaaacttgagagttgctgg

SEQ ID NO: 11209 - RNA, 21 nt, synthetic construct
  source 1..21: mol_type = other RNA
gaacatacaagtggcatgtat

SEQ ID NO: 11210 - RNA, 21 nt, synthetic construct
  source 1..21: mol_type = other RNA
gaatgcctagaatcaataaaa

SEQ ID NO: 11211 - RNA, 21 nt, synthetic construct
  source 1..21: mol_type = other RNA
gaatgtaccaccatttataac

SEQ ID NO: 11212 - RNA, 21 nt, synthetic construct
  source 1..21: mol_type = other RNA
gacaggttttacctgatataa

SEQ ID NO: 11213 - RNA, 21 nt, synthetic construct
  source 1..21: mol_type = other RNA
gacatgaaaaacttgagagtt

SEQ ID NO: 11214 - RNA, 21 nt, synthetic construct
  source 1..21: mol_type = other RNA
gacccagcaactctcaagttt

SEQ ID NO: 11215 - RNA, 21 nt, synthetic construct
  source 1..21: mol_type = other RNA
gagagttgctgggtctgatgg

SEQ ID NO: 11216 - RNA, 21 nt, synthetic construct
  source 1..21: mol_type = other RNA
gaggtgaacatacaagtggca

SEQ ID NO: 11217 - RNA, 21 nt, synthetic construct
  source 1..21: mol_type = other RNA
gagttgctgggtctgatggca

SEQ ID NO: 11218 - RNA, 21 nt, synthetic construct
  source 1..21: mol_type = other RNA
gatataacatcacagtagaca

SEQ ID NO: 11219 - RNA, 21 nt, synthetic construct
  source 1..21: mol_type = other RNA
gatggcatacatgccacttgt

SEQ ID NO: 11220 - RNA, 21 nt, synthetic construct
  source 1..21: mol_type = other RNA
gatgttatatcaggtaaaacc

SEQ ID NO: 11221 - RNA, 21 nt, synthetic construct
  source 1..21: mol_type = other RNA
gattctaggcattcctgctga

SEQ ID NO: 11222 - RNA, 21 nt, synthetic construct
  source 1..21: mol_type = other RNA
gcaactctcaagtttttcatg

SEQ ID NO: 11223 - RNA, 21 nt, synthetic construct
  source 1..21: mol_type = other RNA
gcaggaatgcctagaatcaat

SEQ ID NO: 11224 - RNA, 21 nt, synthetic construct
  source 1..21: mol_type = other RNA
gcatacatgccacttgtatgt

SEQ ID NO: 11225 - RNA, 21 nt, synthetic construct
  source 1..21: mol_type = other RNA
gcatgtatgccatcagaccca

SEQ ID NO: 11226 - RNA, 21 nt, synthetic construct
  source 1..21: mol_type = other RNA
gcattcctgctgaatgtacca

SEQ ID NO: 11227 - RNA, 21 nt, synthetic construct
  source 1..21: mol_type = other RNA
gccacttgtatgttcacctct

SEQ ID NO: 11228 - RNA, 21 nt, synthetic construct
  source 1..21: mol_type = other RNA
gccatcagacccagcaactct

SEQ ID NO: 11229 - RNA, 21 nt, synthetic construct
  source 1..21: mol_type = other RNA
gcctagaatcaataaaatgtt

SEQ ID NO: 11230 - RNA, 21 nt, synthetic construct
  source 1..21: mol_type = other RNA
gctgaatgtaccaccatttat

SEQ ID NO: 11231 - RNA, 21 nt, synthetic construct
  source 1..21: mol_type = other RNA
gctgggtctgatggcatacat

SEQ ID NO: 11232 - RNA, 21 nt, synthetic construct
  source 1..21: mol_type = other RNA
ggaatgcctagaatcaataaa

SEQ ID NO: 11233 - RNA, 21 nt, synthetic construct
  source 1..21: mol_type = other RNA
ggcatacatgccacttgtatg

SEQ ID NO: 11234 - RNA, 21 nt, synthetic construct
  source 1..21: mol_type = other RNA
ggcatgtatgccatcagaccc

SEQ ID NO: 11235 - RNA, 21 nt, synthetic construct
  source 1..21: mol_type = other RNA
ggcattcctgctgaatgtacc

SEQ ID NO: 11236 - RNA, 21 nt, synthetic construct
  source 1..21: mol_type = other RNA
gggtctgatggcatacatgcc

SEQ ID NO: 11237 - RNA, 21 nt, synthetic construct
  source 1..21: mol_type = other RNA
ggtaaaacctgtctaaggaga

SEQ ID NO: 11238 - RNA, 21 nt, synthetic construct
  source 1..21: mol_type = other RNA
ggtacattcagcaggaatgcc

SEQ ID NO: 11239 - RNA, 21 nt, synthetic construct
  source 1..21: mol_type = other RNA
ggtctgatggcatacatgcca

SEQ ID NO: 11240 - RNA, 21 nt, synthetic construct
  source 1..21: mol_type = other RNA
ggtgaacatacaagtggcatg

SEQ ID NO: 11241 - RNA, 21 nt, synthetic construct
  source 1..21: mol_type = other RNA
ggtggtacattcagcaggaat

SEQ ID NO: 11242 - RNA, 21 nt, synthetic construct
  source 1..21: mol_type = other RNA
ggttttacctgatataacatc

SEQ ID NO: 11243 - RNA, 21 nt, synthetic construct
  source 1..21: mol_type = other RNA
gtaaaacctgtctaaggagaa

SEQ ID NO: 11244 - RNA, 21 nt, synthetic construct
  source 1..21: mol_type = other RNA
gtacattcagcaggaatgcct

SEQ ID NO: 11245 - RNA, 21 nt, synthetic construct
  source 1..21: mol_type = other RNA
gtaccaccatttataacagag

SEQ ID NO: 11246 - RNA, 21 nt, synthetic construct
  source 1..21: mol_type = other RNA
gtagacatgaaaaacttgaga

SEQ ID NO: 11247 - RNA, 21 nt, synthetic construct
  source 1..21: mol_type = other RNA
gtatgccatcagacccagcaa

SEQ ID NO: 11248 - RNA, 21 nt, synthetic construct
  source 1..21: mol_type = other RNA
gtatgttcacctctgttataa

SEQ ID NO: 11249 - RNA, 21 nt, synthetic construct
  source 1..21: mol_type = other RNA
gtctactgtgatgttatatca

SEQ ID NO: 11250 - RNA, 21 nt, synthetic construct
  source 1..21: mol_type = other RNA
gtctattctccttagacaggt

SEQ ID NO: 11251 - RNA, 21 nt, synthetic construct
  source 1..21: mol_type = other RNA
gtctgatggcatacatgccac

SEQ ID NO: 11252 - RNA, 21 nt, synthetic construct
  source 1..21: mol_type = other RNA
gtgaacatacaagtggcatgt

SEQ ID NO: 11253 - RNA, 21 nt, synthetic construct
  source 1..21: mol_type = other RNA
gtgatgttatatcaggtaaaa

SEQ ID NO: 11254 - RNA, 21 nt, synthetic construct
  source 1..21: mol_type = other RNA
gtggcatgtatgccatcagac

SEQ ID NO: 11255 - RNA, 21 nt, synthetic construct
  source 1..21: mol_type = other RNA
gtggtacattcagcaggaatg

SEQ ID NO: 11256 - RNA, 21 nt, synthetic construct
  source 1..21: mol_type = other RNA
gttataaatggtggtacattc

SEQ ID NO: 11257 - RNA, 21 nt, synthetic construct
  source 1..21: mol_type = other RNA
gttatatcaggtaaaacctgt

SEQ ID NO: 11258 - RNA, 21 nt, synthetic construct
  source 1..21: mol_type = other RNA
gttcacctctgttataaatgg

SEQ ID NO: 11259 - RNA, 21 nt, synthetic construct
  source 1..21: mol_type = other RNA
gttgctgggtctgatggcata

SEQ ID NO: 11260 - RNA, 21 nt, synthetic construct
  source 1..21: mol_type = other RNA
gttttacctgatataacatca

SEQ ID NO: 11261 - RNA, 21 nt, synthetic construct
  source 1..21: mol_type = other RNA
gtttttcatgtctactgtgat

SEQ ID NO: 11262 - RNA, 21 nt, synthetic construct
  source 1..21: mol_type = other RNA
taaaacctgtctaaggagaat

SEQ ID NO: 11263 - RNA, 21 nt, synthetic construct
  source 1..21: mol_type = other RNA
taaatggtggtacattcagca

SEQ ID NO: 11264 - RNA, 21 nt, synthetic construct
  source 1..21: mol_type = other RNA
taacagaggtgaacatacaag

SEQ ID NO: 11265 - RNA, 21 nt, synthetic construct
  source 1..21: mol_type = other RNA
taacatcacagtagacatgaa

SEQ ID NO: 11266 - RNA, 21 nt, synthetic construct
  source 1..21: mol_type = other RNA
taacattttattgattctagg

SEQ ID NO: 11267 - RNA, 21 nt, synthetic construct
  source 1..21: mol_type = other RNA
tacaagtggcatgtatgccat

SEQ ID NO: 11268 - RNA, 21 nt, synthetic construct
  source 1..21: mol_type = other RNA
tacatgccacttgtatgttca

SEQ ID NO: 11269 - RNA, 21 nt, synthetic construct
  source 1..21: mol_type = other RNA
tacattcagcaggaatgccta

SEQ ID NO: 11270 - RNA, 21 nt, synthetic construct
  source 1..21: mol_type = other RNA
taccaccatttataacagagg

SEQ ID NO: 11271 - RNA, 21 nt, synthetic construct
  source 1..21: mol_type = other RNA
tacctgatataacatcacagt

SEQ ID NO: 11272 - RNA, 21 nt, synthetic construct
  source 1..21: mol_type = other RNA
tactgtctattctccttagac

SEQ ID NO: 11273 - RNA, 21 nt, synthetic construct
  source 1..21: mol_type = other RNA
tactgtgatgttatatcaggt

SEQ ID NO: 11274 - RNA, 21 nt, synthetic construct
  source 1..21: mol_type = other RNA
tagacaggttttacctgatat

SEQ ID NO: 11275 - RNA, 21 nt, synthetic construct
  source 1..21: mol_type = other RNA
tagacatgaaaaacttgagag

SEQ ID NO: 11276 - RNA, 21 nt, synthetic construct
  source 1..21: mol_type = other RNA
taggcattcctgctgaatgta

SEQ ID NO: 11277 - RNA, 21 nt, synthetic construct
  source 1..21: mol_type = other RNA
tataaatggtggtacattcag

SEQ ID NO: 11278 - RNA, 21 nt, synthetic construct
  source 1..21: mol_type = other RNA
tataacagaggtgaacataca

SEQ ID NO: 11279 - RNA, 21 nt, synthetic construct
  source 1..21: mol_type = other RNA
tataacatcacagtagacatg

SEQ ID NO: 11280 - RNA, 21 nt, synthetic construct
  source 1..21: mol_type = other RNA
tatatcaggtaaaacctgtct

SEQ ID NO: 11281 - RNA, 21 nt, synthetic construct
  source 1..21: mol_type = other RNA
tatcaggtaaaacctgtctaa

SEQ ID NO: 11282 - RNA, 21 nt, synthetic construct
  source 1..21: mol_type = other RNA
tatgccatcagacccagcaac

SEQ ID NO: 11283 - RNA, 21 nt, synthetic construct
  source 1..21: mol_type = other RNA
tatgttcacctctgttataaa

SEQ ID NO: 11284 - RNA, 21 nt, synthetic construct
  source 1..21: mol_type = other RNA
tattctccttagacaggtttt

SEQ ID NO: 11285 - RNA, 21 nt, synthetic construct
  source 1..21: mol_type = other RNA
tattgattctaggcattcctg

SEQ ID NO: 11286 - RNA, 21 nt, synthetic construct
  source 1..21: mol_type = other RNA
tcaagtttttcatgtctactg

SEQ ID NO: 11287 - RNA, 21 nt, synthetic construct
  source 1..21: mol_type = other RNA
tcacagtagacatgaaaaact

SEQ ID NO: 11288 - RNA, 21 nt, synthetic construct
  source 1..21: mol_type = other RNA
tcacctctgttataaatggtg

SEQ ID NO: 11289 - RNA, 21 nt, synthetic construct
  source 1..21: mol_type = other RNA
tcagacccagcaactctcaag

SEQ ID NO: 11290 - RNA, 21 nt, synthetic construct
  source 1..21: mol_type = other RNA
tcagcaggaatgcctagaatc

SEQ ID NO: 11291 - RNA, 21 nt, synthetic construct
  source 1..21: mol_type = other RNA
tcaggtaaaacctgtctaagg

SEQ ID NO: 11292 - RNA, 21 nt, synthetic construct
  source 1..21: mol_type = other RNA
tcatgtctactgtgatgttat

SEQ ID NO: 11293 - RNA, 21 nt, synthetic construct
  source 1..21: mol_type = other RNA
tcctgctgaatgtaccaccat

SEQ ID NO: 11294 - RNA, 21 nt, synthetic construct
  source 1..21: mol_type = other RNA
tccttagacaggttttacctg

SEQ ID NO: 11295 - RNA, 21 nt, synthetic construct
  source 1..21: mol_type = other RNA
tctactgtgatgttatatcag

SEQ ID NO: 11296 - RNA, 21 nt, synthetic construct
  source 1..21: mol_type = other RNA
tctaggcattcctgctgaatg

SEQ ID NO: 11297 - RNA, 21 nt, synthetic construct
  source 1..21: mol_type = other RNA
tctattctccttagacaggtt

SEQ ID NO: 11298 - RNA, 21 nt, synthetic construct
  source 1..21: mol_type = other RNA
tctcaagtttttcatgtctac

SEQ ID NO: 11299 - RNA, 21 nt, synthetic construct
  source 1..21: mol_type = other RNA
tctccttagacaggttttacc

SEQ ID NO: 11300 - RNA, 21 nt, synthetic construct
  source 1..21: mol_type = other RNA
tctgatggcatacatgccact

SEQ ID NO: 11301 - RNA, 21 nt, synthetic construct
  source 1..21: mol_type = other RNA
tctgttataaatggtggtaca

SEQ ID NO: 11302 - RNA, 21 nt, synthetic construct
  source 1..21: mol_type = other RNA
tgaaaaacttgagagttgctg

SEQ ID NO: 11303 - RNA, 21 nt, synthetic construct
  source 1..21: mol_type = other RNA
tgaacatacaagtggcatgta

SEQ ID NO: 11304 - RNA, 21 nt, synthetic construct
  source 1..21: mol_type = other RNA
tgaatgtaccaccatttataa

SEQ ID NO: 11305 - RNA, 21 nt, synthetic construct
  source 1..21: mol_type = other RNA
tgagagttgctgggtctgatg

SEQ ID NO: 11306 - RNA, 21 nt, synthetic construct
  source 1..21: mol_type = other RNA
tgatataacatcacagtagac

SEQ ID NO: 11307 - RNA, 21 nt, synthetic construct
  source 1..21: mol_type = other RNA
tgatggcatacatgccacttg

SEQ ID NO: 11308 - RNA, 21 nt, synthetic construct
  source 1..21: mol_type = other RNA
tgatgttatatcaggtaaaac

SEQ ID NO: 11309 - RNA, 21 nt, synthetic construct
  source 1..21: mol_type = other RNA
tgattctaggcattcctgctg

SEQ ID NO: 11310 - RNA, 21 nt, synthetic construct
  source 1..21: mol_type = other RNA
tgccacttgtatgttcacctc

SEQ ID NO: 11311 - RNA, 21 nt, synthetic construct
  source 1..21: mol_type = other RNA
tgccatcagacccagcaactc

SEQ ID NO: 11312 - RNA, 21 nt, synthetic construct
  source 1..21: mol_type = other RNA
tgcctagaatcaataaaatgt

SEQ ID NO: 11313 - RNA, 21 nt, synthetic construct
  source 1..21: mol_type = other RNA
tgctgaatgtaccaccattta

SEQ ID NO: 11314 - RNA, 21 nt, synthetic construct
  source 1..21: mol_type = other RNA
tgctgggtctgatggcataca

SEQ ID NO: 11315 - RNA, 21 nt, synthetic construct
  source 1..21: mol_type = other RNA
tggcatacatgccacttgtat

SEQ ID NO: 11316 - RNA, 21 nt, synthetic construct
  source 1..21: mol_type = other RNA
tggcatgtatgccatcagacc

SEQ ID NO: 11317 - RNA, 21 nt, synthetic construct
  source 1..21: mol_type = other RNA
tgggtctgatggcatacatgc

SEQ ID NO: 11318 - RNA, 21 nt, synthetic construct
  source 1..21: mol_type = other RNA
tggtacattcagcaggaatgc

SEQ ID NO: 11319 - RNA, 21 nt, synthetic construct
  source 1..21: mol_type = other RNA
tggtggtacattcagcaggaa

SEQ ID NO: 11320 - RNA, 21 nt, synthetic construct
  source 1..21: mol_type = other RNA
tgtaccaccatttataacaga

SEQ ID NO: 11321 - RNA, 21 nt, synthetic construct
  source 1..21: mol_type = other RNA
tgtatgccatcagacccagca

SEQ ID NO: 11322 - RNA, 21 nt, synthetic construct
  source 1..21: mol_type = other RNA
tgtatgttcacctctgttata

SEQ ID NO: 11323 - RNA, 21 nt, synthetic construct
  source 1..21: mol_type = other RNA
tgtctactgtgatgttatatc

SEQ ID NO: 11324 - RNA, 21 nt, synthetic construct
  source 1..21: mol_type = other RNA
tgtctattctccttagacagg

SEQ ID NO: 11325 - RNA, 21 nt, synthetic construct
  source 1..21: mol_type = other RNA
tgtgatgttatatcaggtaaa

SEQ ID NO: 11326 - RNA, 21 nt, synthetic construct
  source 1..21: mol_type = other RNA
tgttataaatggtggtacatt

SEQ ID NO: 11327 - RNA, 21 nt, synthetic construct
  source 1..21: mol_type = other RNA
tgttatatcaggtaaaacctg

SEQ ID NO: 11328 - RNA, 21 nt, synthetic construct
  source 1..21: mol_type = other RNA
tgttcacctctgttataaatg

SEQ ID NO: 11329 - RNA, 21 nt, synthetic construct
  source 1..21: mol_type = other RNA
ttacctgatataacatcacag

SEQ ID NO: 11330 - RNA, 21 nt, synthetic construct
  source 1..21: mol_type = other RNA
ttagacaggttttacctgata

SEQ ID NO: 11331 - RNA, 21 nt, synthetic construct
  source 1..21: mol_type = other RNA
ttataaatggtggtacattca

SEQ ID NO: 11332 - RNA, 21 nt, synthetic construct
  source 1..21: mol_type = other RNA
ttataacagaggtgaacatac

SEQ ID NO: 11333 - RNA, 21 nt, synthetic construct
  source 1..21: mol_type = other RNA
ttatatcaggtaaaacctgtc

SEQ ID NO: 11334 - RNA, 21 nt, synthetic construct
  source 1..21: mol_type = other RNA
ttattgattctaggcattcct

SEQ ID NO: 11335 - RNA, 21 nt, synthetic construct
  source 1..21: mol_type = other RNA
ttcacctctgttataaatggt

SEQ ID NO: 11336 - RNA, 21 nt, synthetic construct
  source 1..21: mol_type = other RNA
ttcagcaggaatgcctagaat

SEQ ID NO: 11337 - RNA, 21 nt, synthetic construct
  source 1..21: mol_type = other RNA
ttcatgtctactgtgatgtta

SEQ ID NO: 11338 - RNA, 21 nt, synthetic construct
  source 1..21: mol_type = other RNA
ttcctgctgaatgtaccacca

SEQ ID NO: 11339 - RNA, 21 nt, synthetic construct
  source 1..21: mol_type = other RNA
ttctaggcattcctgctgaat

SEQ ID NO: 11340 - RNA, 21 nt, synthetic construct
  source 1..21: mol_type = other RNA
ttctccttagacaggttttac

SEQ ID NO: 11341 - RNA, 21 nt, synthetic construct
  source 1..21: mol_type = other RNA
ttgagagttgctgggtctgat

SEQ ID NO: 11342 - RNA, 21 nt, synthetic construct
  source 1..21: mol_type = other RNA
ttgattctaggcattcctgct

SEQ ID NO: 11343 - RNA, 21 nt, synthetic construct
  source 1..21: mol_type = other RNA
ttgctgggtctgatggcatac

SEQ ID NO: 11344 - RNA, 21 nt, synthetic construct
  source 1..21: mol_type = other RNA
ttgtatgttcacctctgttat

SEQ ID NO: 11345 - RNA, 21 nt, synthetic construct
  source 1..21: mol_type = other RNA
tttacctgatataacatcaca

SEQ ID NO: 11346 - RNA, 21 nt, synthetic construct
  source 1..21: mol_type = other RNA
tttataacagaggtgaacata

SEQ ID NO: 11347 - RNA, 21 nt, synthetic construct
  source 1..21: mol_type = other RNA
tttattgattctaggcattcc

SEQ ID NO: 11348 - RNA, 21 nt, synthetic construct
  source 1..21: mol_type = other RNA
tttcatgtctactgtgatgtt

SEQ ID NO: 11349 - RNA, 21 nt, synthetic construct
  source 1..21: mol_type = other RNA
ttttacctgatataacatcac

SEQ ID NO: 11350 - RNA, 21 nt, synthetic construct
  source 1..21: mol_type = other RNA
ttttattgattctaggcattc

SEQ ID NO: 11351 - RNA, 21 nt, synthetic construct
  source 1..21: mol_type = other RNA
ttttcatgtctactgtgatgt

SEQ ID NO: 11352 - RNA, 21 nt, synthetic construct
  source 1..21: mol_type = other RNA
tttttcatgtctactgtgatg

SEQ ID NO: 11353 - RNA, 22 nt, synthetic construct
  source 1..22: mol_type = other RNA
aaaaacttgagagttgctgggt

SEQ ID NO: 11354 - RNA, 22 nt, synthetic construct
  source 1..22: mol_type = other RNA
aaaacttgagagttgctgggtc

SEQ ID NO: 11355 - RNA, 22 nt, synthetic construct
  source 1..22: mol_type = other RNA
aaacttgagagttgctgggtct

SEQ ID NO: 11356 - RNA, 22 nt, synthetic construct
  source 1..22: mol_type = other RNA
aaatggtggtacattcagcagg

SEQ ID NO: 11357 - RNA, 22 nt, synthetic construct
  source 1..22: mol_type = other RNA
aacagaggtgaacatacaagtg

SEQ ID NO: 11358 - RNA, 22 nt, synthetic construct
  source 1..22: mol_type = other RNA
aacatacaagtggcatgtatgc

SEQ ID NO: 11359 - RNA, 22 nt, synthetic construct
  source 1..22: mol_type = other RNA
aacatcacagtagacatgaaaa

SEQ ID NO: 11360 - RNA, 22 nt, synthetic construct
  source 1..22: mol_type = other RNA
aacattttattgattctaggca

SEQ ID NO: 11361 - RNA, 22 nt, synthetic construct
  source 1..22: mol_type = other RNA
aactctcaagtttttcatgtct

SEQ ID NO: 11362 - RNA, 22 nt, synthetic construct
  source 1..22: mol_type = other RNA
aacttgagagttgctgggtctg

SEQ ID NO: 11363 - RNA, 22 nt, synthetic construct
  source 1..22: mol_type = other RNA
aagtggcatgtatgccatcaga

SEQ ID NO: 11364 - RNA, 22 nt, synthetic construct
  source 1..22: mol_type = other RNA
aagtttttcatgtctactgtga

SEQ ID NO: 11365 - RNA, 22 nt, synthetic construct
  source 1..22: mol_type = other RNA
aatgcctagaatcaataaaatg

SEQ ID NO: 11366 - RNA, 22 nt, synthetic construct
  source 1..22: mol_type = other RNA
aatggtggtacattcagcagga

SEQ ID NO: 11367 - RNA, 22 nt, synthetic construct
  source 1..22: mol_type = other RNA
aatgtaccaccatttataacag

SEQ ID NO: 11368 - RNA, 22 nt, synthetic construct
  source 1..22: mol_type = other RNA
acaagtggcatgtatgccatca

SEQ ID NO: 11369 - RNA, 22 nt, synthetic construct
  source 1..22: mol_type = other RNA
acagaggtgaacatacaagtgg

SEQ ID NO: 11370 - RNA, 22 nt, synthetic construct
  source 1..22: mol_type = other RNA
acaggttttacctgatataaca

SEQ ID NO: 11371 - RNA, 22 nt, synthetic construct
  source 1..22: mol_type = other RNA
acagtagacatgaaaaacttga

SEQ ID NO: 11372 - RNA, 22 nt, synthetic construct
  source 1..22: mol_type = other RNA
acatacaagtggcatgtatgcc

SEQ ID NO: 11373 - RNA, 22 nt, synthetic construct
  source 1..22: mol_type = other RNA
acatcacagtagacatgaaaaa

SEQ ID NO: 11374 - RNA, 22 nt, synthetic construct
  source 1..22: mol_type = other RNA
acatgaaaaacttgagagttgc

SEQ ID NO: 11375 - RNA, 22 nt, synthetic construct
  source 1..22: mol_type = other RNA
acatgccacttgtatgttcacc

SEQ ID NO: 11376 - RNA, 22 nt, synthetic construct
  source 1..22: mol_type = other RNA
acattcagcaggaatgcctaga

SEQ ID NO: 11377 - RNA, 22 nt, synthetic construct
  source 1..22: mol_type = other RNA
acattttattgattctaggcat

SEQ ID NO: 11378 - RNA, 22 nt, synthetic construct
  source 1..22: mol_type = other RNA
accaccatttataacagaggtg

SEQ ID NO: 11379 - RNA, 22 nt, synthetic construct
  source 1..22: mol_type = other RNA
accatttataacagaggtgaac

SEQ ID NO: 11380 - RNA, 22 nt, synthetic construct
  source 1..22: mol_type = other RNA
acccagcaactctcaagttttt

SEQ ID NO: 11381 - RNA, 22 nt, synthetic construct
  source 1..22: mol_type = other RNA
acctctgttataaatggtggta

SEQ ID NO: 11382 - RNA, 22 nt, synthetic construct
  source 1..22: mol_type = other RNA
acctgatataacatcacagtag

SEQ ID NO: 11383 - RNA, 22 nt, synthetic construct
  source 1..22: mol_type = other RNA
actctcaagtttttcatgtcta

SEQ ID NO: 11384 - RNA, 22 nt, synthetic construct
  source 1..22: mol_type = other RNA
actgtctattctccttagacag

SEQ ID NO: 11385 - RNA, 22 nt, synthetic construct
  source 1..22: mol_type = other RNA
actgtgatgttatatcaggtaa

SEQ ID NO: 11386 - RNA, 22 nt, synthetic construct
  source 1..22: mol_type = other RNA
acttgagagttgctgggtctga

SEQ ID NO: 11387 - RNA, 22 nt, synthetic construct
  source 1..22: mol_type = other RNA
acttgtatgttcacctctgtta

SEQ ID NO: 11388 - RNA, 22 nt, synthetic construct
  source 1..22: mol_type = other RNA
agacaggttttacctgatataa

SEQ ID NO: 11389 - RNA, 22 nt, synthetic construct
  source 1..22: mol_type = other RNA
agacatgaaaaacttgagagtt

SEQ ID NO: 11390 - RNA, 22 nt, synthetic construct
  source 1..22: mol_type = other RNA
agacccagcaactctcaagttt

SEQ ID NO: 11391 - RNA, 22 nt, synthetic construct
  source 1..22: mol_type = other RNA
agaggtgaacatacaagtggca

SEQ ID NO: 11392 - RNA, 22 nt, synthetic construct
  source 1..22: mol_type = other RNA
agagttgctgggtctgatggca

SEQ ID NO: 11393 - RNA, 22 nt, synthetic construct
  source 1..22: mol_type = other RNA
agcaactctcaagtttttcatg

SEQ ID NO: 11394 - RNA, 22 nt, synthetic construct
  source 1..22: mol_type = other RNA
agcaggaatgcctagaatcaat

SEQ ID NO: 11395 - RNA, 22 nt, synthetic construct
  source 1..22: mol_type = other RNA
aggaatgcctagaatcaataaa

SEQ ID NO: 11396 - RNA, 22 nt, synthetic construct
  source 1..22: mol_type = other RNA
aggcattcctgctgaatgtacc

SEQ ID NO: 11397 - RNA, 22 nt, synthetic construct
  source 1..22: mol_type = other RNA
aggtaaaacctgtctaaggaga

SEQ ID NO: 11398 - RNA, 22 nt, synthetic construct
  source 1..22: mol_type = other RNA
aggtgaacatacaagtggcatg

SEQ ID NO: 11399 - RNA, 22 nt, synthetic construct
  source 1..22: mol_type = other RNA
aggttttacctgatataacatc

SEQ ID NO: 11400 - RNA, 22 nt, synthetic construct
  source 1..22: mol_type = other RNA
agtagacatgaaaaacttgaga

SEQ ID NO: 11401 - RNA, 22 nt, synthetic construct
  source 1..22: mol_type = other RNA
agtggcatgtatgccatcagac

SEQ ID NO: 11402 - RNA, 22 nt, synthetic construct
  source 1..22: mol_type = other RNA
agttgctgggtctgatggcata

SEQ ID NO: 11403 - RNA, 22 nt, synthetic construct
  source 1..22: mol_type = other RNA
agtttttcatgtctactgtgat

SEQ ID NO: 11404 - RNA, 22 nt, synthetic construct
  source 1..22: mol_type = other RNA
ataaatggtggtacattcagca

SEQ ID NO: 11405 - RNA, 22 nt, synthetic construct
  source 1..22: mol_type = other RNA
ataacagaggtgaacatacaag

SEQ ID NO: 11406 - RNA, 22 nt, synthetic construct
  source 1..22: mol_type = other RNA
ataacatcacagtagacatgaa

SEQ ID NO: 11407 - RNA, 22 nt, synthetic construct
  source 1..22: mol_type = other RNA
ataacattttattgattctagg

SEQ ID NO: 11408 - RNA, 22 nt, synthetic construct
  source 1..22: mol_type = other RNA
atacaagtggcatgtatgccat

SEQ ID NO: 11409 - RNA, 22 nt, synthetic construct
  source 1..22: mol_type = other RNA
atacatgccacttgtatgttca

SEQ ID NO: 11410 - RNA, 22 nt, synthetic construct
  source 1..22: mol_type = other RNA
atataacatcacagtagacatg

SEQ ID NO: 11411 - RNA, 22 nt, synthetic construct
  source 1..22: mol_type = other RNA
atatcaggtaaaacctgtctaa

SEQ ID NO: 11412 - RNA, 22 nt, synthetic construct
  source 1..22: mol_type = other RNA
atcacagtagacatgaaaaact

SEQ ID NO: 11413 - RNA, 22 nt, synthetic construct
  source 1..22: mol_type = other RNA
atcagacccagcaactctcaag

SEQ ID NO: 11414 - RNA, 22 nt, synthetic construct
  source 1..22: mol_type = other RNA
atcaggtaaaacctgtctaagg

SEQ ID NO: 11415 - RNA, 22 nt, synthetic construct
  source 1..22: mol_type = other RNA
atgaaaaacttgagagttgctg

SEQ ID NO: 11416 - RNA, 22 nt, synthetic construct
  source 1..22: mol_type = other RNA
atgccacttgtatgttcacctc

SEQ ID NO: 11417 - RNA, 22 nt, synthetic construct
  source 1..22: mol_type = other RNA
atgccatcagacccagcaactc

SEQ ID NO: 11418 - RNA, 22 nt, synthetic construct
  source 1..22: mol_type = other RNA
atgcctagaatcaataaaatgt

SEQ ID NO: 11419 - RNA, 22 nt, synthetic construct
  source 1..22: mol_type = other RNA
atggcatacatgccacttgtat

SEQ ID NO: 11420 - RNA, 22 nt, synthetic construct
  source 1..22: mol_type = other RNA
atggtggtacattcagcaggaa

SEQ ID NO: 11421 - RNA, 22 nt, synthetic construct
  source 1..22: mol_type = other RNA
atgtaccaccatttataacaga

SEQ ID NO: 11422 - RNA, 22 nt, synthetic construct
  source 1..22: mol_type = other RNA
atgtatgccatcagacccagca

SEQ ID NO: 11423 - RNA, 22 nt, synthetic construct
  source 1..22: mol_type = other RNA
atgtctactgtgatgttatatc

SEQ ID NO: 11424 - RNA, 22 nt, synthetic construct
  source 1..22: mol_type = other RNA
atgttatatcaggtaaaacctg

SEQ ID NO: 11425 - RNA, 22 nt, synthetic construct
  source 1..22: mol_type = other RNA
atgttcacctctgttataaatg

SEQ ID NO: 11426 - RNA, 22 nt, synthetic construct
  source 1..22: mol_type = other RNA
attcagcaggaatgcctagaat

SEQ ID NO: 11427 - RNA, 22 nt, synthetic construct
  source 1..22: mol_type = other RNA
attcctgctgaatgtaccacca

SEQ ID NO: 11428 - RNA, 22 nt, synthetic construct
  source 1..22: mol_type = other RNA
attctaggcattcctgctgaat

SEQ ID NO: 11429 - RNA, 22 nt, synthetic construct
  source 1..22: mol_type = other RNA
attctccttagacaggttttac

SEQ ID NO: 11430 - RNA, 22 nt, synthetic construct
  source 1..22: mol_type = other RNA
attgattctaggcattcctgct

SEQ ID NO: 11431 - RNA, 22 nt, synthetic construct
  source 1..22: mol_type = other RNA
atttataacagaggtgaacata

SEQ ID NO: 11432 - RNA, 22 nt, synthetic construct
  source 1..22: mol_type = other RNA
attttattgattctaggcattc

SEQ ID NO: 11433 - RNA, 22 nt, synthetic construct
  source 1..22: mol_type = other RNA
caactctcaagtttttcatgtc

SEQ ID NO: 11434 - RNA, 22 nt, synthetic construct
  source 1..22: mol_type = other RNA
caagtggcatgtatgccatcag

SEQ ID NO: 11435 - RNA, 22 nt, synthetic construct
  source 1..22: mol_type = other RNA
caagtttttcatgtctactgtg

SEQ ID NO: 11436 - RNA, 22 nt, synthetic construct
  source 1..22: mol_type = other RNA
cacagtagacatgaaaaacttg

SEQ ID NO: 11437 - RNA, 22 nt, synthetic construct
  source 1..22: mol_type = other RNA
caccatttataacagaggtgaa

SEQ ID NO: 11438 - RNA, 22 nt, synthetic construct
  source 1..22: mol_type = other RNA
cacctctgttataaatggtggt

SEQ ID NO: 11439 - RNA, 22 nt, synthetic construct
  source 1..22: mol_type = other RNA
cacttgtatgttcacctctgtt

SEQ ID NO: 11440 - RNA, 22 nt, synthetic construct
  source 1..22: mol_type = other RNA
cagacccagcaactctcaagtt

SEQ ID NO: 11441 - RNA, 22 nt, synthetic construct
  source 1..22: mol_type = other RNA
cagaggtgaacatacaagtggc

SEQ ID NO: 11442 - RNA, 22 nt, synthetic construct
  source 1..22: mol_type = other RNA
cagcaactctcaagtttttcat

SEQ ID NO: 11443 - RNA, 22 nt, synthetic construct
  source 1..22: mol_type = other RNA
cagcaggaatgcctagaatcaa

SEQ ID NO: 11444 - RNA, 22 nt, synthetic construct
  source 1..22: mol_type = other RNA
caggaatgcctagaatcaataa

SEQ ID NO: 11445 - RNA, 22 nt, synthetic construct
  source 1..22: mol_type = other RNA
caggtaaaacctgtctaaggag

SEQ ID NO: 11446 - RNA, 22 nt, synthetic construct
  source 1..22: mol_type = other RNA
caggttttacctgatataacat

SEQ ID NO: 11447 - RNA, 22 nt, synthetic construct
  source 1..22: mol_type = other RNA
cagtagacatgaaaaacttgag

SEQ ID NO: 11448 - RNA, 22 nt, synthetic construct
  source 1..22: mol_type = other RNA
catacaagtggcatgtatgcca

SEQ ID NO: 11449 - RNA, 22 nt, synthetic construct
  source 1..22: mol_type = other RNA
catacatgccacttgtatgttc

SEQ ID NO: 11450 - RNA, 22 nt, synthetic construct
  source 1..22: mol_type = other RNA
catcacagtagacatgaaaaac

SEQ ID NO: 11451 - RNA, 22 nt, synthetic construct
  source 1..22: mol_type = other RNA
catcagacccagcaactctcaa

SEQ ID NO: 11452 - RNA, 22 nt, synthetic construct
  source 1..22: mol_type = other RNA
catgaaaaacttgagagttgct

SEQ ID NO: 11453 - RNA, 22 nt, synthetic construct
  source 1..22: mol_type = other RNA
catgccacttgtatgttcacct

SEQ ID NO: 11454 - RNA, 22 nt, synthetic construct
  source 1..22: mol_type = other RNA
catgtatgccatcagacccagc

SEQ ID NO: 11455 - RNA, 22 nt, synthetic construct
  source 1..22: mol_type = other RNA
catgtctactgtgatgttatat

SEQ ID NO: 11456 - RNA, 22 nt, synthetic construct
  source 1..22: mol_type = other RNA
cattcagcaggaatgcctagaa

SEQ ID NO: 11457 - RNA, 22 nt, synthetic construct
  source 1..22: mol_type = other RNA
cattcctgctgaatgtaccacc

SEQ ID NO: 11458 - RNA, 22 nt, synthetic construct
  source 1..22: mol_type = other RNA
catttataacagaggtgaacat

SEQ ID NO: 11459 - RNA, 22 nt, synthetic construct
  source 1..22: mol_type = other RNA
cattttattgattctaggcatt

SEQ ID NO: 11460 - RNA, 22 nt, synthetic construct
  source 1..22: mol_type = other RNA
ccaccatttataacagaggtga

SEQ ID NO: 11461 - RNA, 22 nt, synthetic construct
  source 1..22: mol_type = other RNA
ccacttgtatgttcacctctgt

SEQ ID NO: 11462 - RNA, 22 nt, synthetic construct
  source 1..22: mol_type = other RNA
ccagcaactctcaagtttttca

SEQ ID NO: 11463 - RNA, 22 nt, synthetic construct
  source 1..22: mol_type = other RNA
ccatcagacccagcaactctca

SEQ ID NO: 11464 - RNA, 22 nt, synthetic construct
  source 1..22: mol_type = other RNA
ccatttataacagaggtgaaca

SEQ ID NO: 11465 - RNA, 22 nt, synthetic construct
  source 1..22: mol_type = other RNA
cccagcaactctcaagtttttc

SEQ ID NO: 11466 - RNA, 22 nt, synthetic construct
  source 1..22: mol_type = other RNA
cctagaatcaataaaatgttat

SEQ ID NO: 11467 - RNA, 22 nt, synthetic construct
  source 1..22: mol_type = other RNA
cctctgttataaatggtggtac

SEQ ID NO: 11468 - RNA, 22 nt, synthetic construct
  source 1..22: mol_type = other RNA
cctgatataacatcacagtaga

SEQ ID NO: 11469 - RNA, 22 nt, synthetic construct
  source 1..22: mol_type = other RNA
cctgctgaatgtaccaccattt

SEQ ID NO: 11470 - RNA, 22 nt, synthetic construct
  source 1..22: mol_type = other RNA
ccttagacaggttttacctgat

SEQ ID NO: 11471 - RNA, 22 nt, synthetic construct
  source 1..22: mol_type = other RNA
ctactgtgatgttatatcaggt

SEQ ID NO: 11472 - RNA, 22 nt, synthetic construct
  source 1..22: mol_type = other RNA
ctaggcattcctgctgaatgta

SEQ ID NO: 11473 - RNA, 22 nt, synthetic construct
  source 1..22: mol_type = other RNA
ctattctccttagacaggtttt

SEQ ID NO: 11474 - RNA, 22 nt, synthetic construct
  source 1..22: mol_type = other RNA
ctcaagtttttcatgtctactg

SEQ ID NO: 11475 - RNA, 22 nt, synthetic construct
  source 1..22: mol_type = other RNA
ctccttagacaggttttacctg

SEQ ID NO: 11476 - RNA, 22 nt, synthetic construct
  source 1..22: mol_type = other RNA
ctctcaagtttttcatgtctac

SEQ ID NO: 11477 - RNA, 22 nt, synthetic construct
  source 1..22: mol_type = other RNA
ctctgttataaatggtggtaca

SEQ ID NO: 11478 - RNA, 22 nt, synthetic construct
  source 1..22: mol_type = other RNA
ctgaatgtaccaccatttataa

SEQ ID NO: 11479 - RNA, 22 nt, synthetic construct
  source 1..22: mol_type = other RNA
ctgatataacatcacagtagac

SEQ ID NO: 11480 - RNA, 22 nt, synthetic construct
  source 1..22: mol_type = other RNA
ctgatggcatacatgccacttg

SEQ ID NO: 11481 - RNA, 22 nt, synthetic construct
  source 1..22: mol_type = other RNA
ctgatgtaataacattttattg

SEQ ID NO: 11482 - RNA, 22 nt, synthetic construct
  source 1..22: mol_type = other RNA
ctgctgaatgtaccaccattta

SEQ ID NO: 11483 - RNA, 22 nt, synthetic construct
  source 1..22: mol_type = other RNA
ctgggtctgatggcatacatgc

SEQ ID NO: 11484 - RNA, 22 nt, synthetic construct
  source 1..22: mol_type = other RNA
ctgtctattctccttagacagg

SEQ ID NO: 11485 - RNA, 22 nt, synthetic construct
  source 1..22: mol_type = other RNA
ctgtgatgttatatcaggtaaa

SEQ ID NO: 11486 - RNA, 22 nt, synthetic construct
  source 1..22: mol_type = other RNA
ctgttataaatggtggtacatt

SEQ ID NO: 11487 - RNA, 22 nt, synthetic construct
  source 1..22: mol_type = other RNA
cttagacaggttttacctgata

SEQ ID NO: 11488 - RNA, 22 nt, synthetic construct
  source 1..22: mol_type = other RNA
cttgagagttgctgggtctgat

SEQ ID NO: 11489 - RNA, 22 nt, synthetic construct
  source 1..22: mol_type = other RNA
cttgtatgttcacctctgttat

SEQ ID NO: 11490 - RNA, 22 nt, synthetic construct
  source 1..22: mol_type = other RNA
gaaaaacttgagagttgctggg

SEQ ID NO: 11491 - RNA, 22 nt, synthetic construct
  source 1..22: mol_type = other RNA
gaacatacaagtggcatgtatg

SEQ ID NO: 11492 - RNA, 22 nt, synthetic construct
  source 1..22: mol_type = other RNA
gaatgcctagaatcaataaaat

SEQ ID NO: 11493 - RNA, 22 nt, synthetic construct
  source 1..22: mol_type = other RNA
gaatgtaccaccatttataaca

SEQ ID NO: 11494 - RNA, 22 nt, synthetic construct
  source 1..22: mol_type = other RNA
gacaggttttacctgatataac

SEQ ID NO: 11495 - RNA, 22 nt, synthetic construct
  source 1..22: mol_type = other RNA
gacatgaaaaacttgagagttg

SEQ ID NO: 11496 - RNA, 22 nt, synthetic construct
  source 1..22: mol_type = other RNA
gacccagcaactctcaagtttt

SEQ ID NO: 11497 - RNA, 22 nt, synthetic construct
  source 1..22: mol_type = other RNA
gagagttgctgggtctgatggc

SEQ ID NO: 11498 - RNA, 22 nt, synthetic construct
  source 1..22: mol_type = other RNA
gaggtgaacatacaagtggcat

SEQ ID NO: 11499 - RNA, 22 nt, synthetic construct
  source 1..22: mol_type = other RNA
gagttgctgggtctgatggcat

SEQ ID NO: 11500 - RNA, 22 nt, synthetic construct
  source 1..22: mol_type = other RNA
gatataacatcacagtagacat

SEQ ID NO: 11501 - RNA, 22 nt, synthetic construct
  source 1..22: mol_type = other RNA
gatggcatacatgccacttgta

SEQ ID NO: 11502 - RNA, 22 nt, synthetic construct
  source 1..22: mol_type = other RNA
gatgttatatcaggtaaaacct

SEQ ID NO: 11503 - RNA, 22 nt, synthetic construct
  source 1..22: mol_type = other RNA
gattctaggcattcctgctgaa

SEQ ID NO: 11504 - RNA, 22 nt, synthetic construct
  source 1..22: mol_type = other RNA
gcaactctcaagtttttcatgt

SEQ ID NO: 11505 - RNA, 22 nt, synthetic construct
  source 1..22: mol_type = other RNA
gcaggaatgcctagaatcaata

SEQ ID NO: 11506 - RNA, 22 nt, synthetic construct
  source 1..22: mol_type = other RNA
gcatacatgccacttgtatgtt

SEQ ID NO: 11507 - RNA, 22 nt, synthetic construct
  source 1..22: mol_type = other RNA
gcatgtatgccatcagacccag

SEQ ID NO: 11508 - RNA, 22 nt, synthetic construct
  source 1..22: mol_type = other RNA
gcattcctgctgaatgtaccac

SEQ ID NO: 11509 - RNA, 22 nt, synthetic construct
  source 1..22: mol_type = other RNA
gccacttgtatgttcacctctg

SEQ ID NO: 11510 - RNA, 22 nt, synthetic construct
  source 1..22: mol_type = other RNA
gccatcagacccagcaactctc

SEQ ID NO: 11511 - RNA, 22 nt, synthetic construct
  source 1..22: mol_type = other RNA
gcctagaatcaataaaatgtta

SEQ ID NO: 11512 - RNA, 22 nt, synthetic construct
  source 1..22: mol_type = other RNA
gctgaatgtaccaccatttata

SEQ ID NO: 11513 - RNA, 22 nt, synthetic construct
  source 1..22: mol_type = other RNA
gctgggtctgatggcatacatg

SEQ ID NO: 11514 - RNA, 22 nt, synthetic construct
  source 1..22: mol_type = other RNA
ggaatgcctagaatcaataaaa

SEQ ID NO: 11515 - RNA, 22 nt, synthetic construct
  source 1..22: mol_type = other RNA
ggcatacatgccacttgtatgt

SEQ ID NO: 11516 - RNA, 22 nt, synthetic construct
  source 1..22: mol_type = other RNA
ggcatgtatgccatcagaccca

SEQ ID NO: 11517 - RNA, 22 nt, synthetic construct
  source 1..22: mol_type = other RNA
ggcattcctgctgaatgtacca

SEQ ID NO: 11518 - RNA, 22 nt, synthetic construct
  source 1..22: mol_type = other RNA
gggtctgatggcatacatgcca

SEQ ID NO: 11519 - RNA, 22 nt, synthetic construct
  source 1..22: mol_type = other RNA
ggtaaaacctgtctaaggagaa

SEQ ID NO: 11520 - RNA, 22 nt, synthetic construct
  source 1..22: mol_type = other RNA
ggtacattcagcaggaatgcct

SEQ ID NO: 11521 - RNA, 22 nt, synthetic construct
  source 1..22: mol_type = other RNA
ggtctgatggcatacatgccac

SEQ ID NO: 11522 - RNA, 22 nt, synthetic construct
  source 1..22: mol_type = other RNA
ggtgaacatacaagtggcatgt

SEQ ID NO: 11523 - RNA, 22 nt, synthetic construct
  source 1..22: mol_type = other RNA
ggtggtacattcagcaggaatg

SEQ ID NO: 11524 - RNA, 22 nt, synthetic construct
  source 1..22: mol_type = other RNA
ggttttacctgatataacatca

SEQ ID NO: 11525 - RNA, 22 nt, synthetic construct
  source 1..22: mol_type = other RNA
gtaaaacctgtctaaggagaat

SEQ ID NO: 11526 - RNA, 22 nt, synthetic construct
  source 1..22: mol_type = other RNA
gtacattcagcaggaatgccta

SEQ ID NO: 11527 - RNA, 22 nt, synthetic construct
  source 1..22: mol_type = other RNA
gtaccaccatttataacagagg

SEQ ID NO: 11528 - RNA, 22 nt, synthetic construct
  source 1..22: mol_type = other RNA
gtagacatgaaaaacttgagag

SEQ ID NO: 11529 - RNA, 22 nt, synthetic construct
  source 1..22: mol_type = other RNA
gtatgccatcagacccagcaac

SEQ ID NO: 11530 - RNA, 22 nt, synthetic construct
  source 1..22: mol_type = other RNA
gtatgttcacctctgttataaa

SEQ ID NO: 11531 - RNA, 22 nt, synthetic construct
  source 1..22: mol_type = other RNA
gtctactgtgatgttatatcag

SEQ ID NO: 11532 - RNA, 22 nt, synthetic construct
  source 1..22: mol_type = other RNA
gtctattctccttagacaggtt

SEQ ID NO: 11533 - RNA, 22 nt, synthetic construct
  source 1..22: mol_type = other RNA
gtctgatggcatacatgccact

SEQ ID NO: 11534 - RNA, 22 nt, synthetic construct
  source 1..22: mol_type = other RNA
gtgaacatacaagtggcatgta

SEQ ID NO: 11535 - RNA, 22 nt, synthetic construct
  source 1..22: mol_type = other RNA
gtgatgttatatcaggtaaaac

SEQ ID NO: 11536 - RNA, 22 nt, synthetic construct
  source 1..22: mol_type = other RNA
gtggcatgtatgccatcagacc

SEQ ID NO: 11537 - RNA, 22 nt, synthetic construct
  source 1..22: mol_type = other RNA
gtggtacattcagcaggaatgc

SEQ ID NO: 11538 - RNA, 22 nt, synthetic construct
  source 1..22: mol_type = other RNA
gttataaatggtggtacattca

SEQ ID NO: 11539 - RNA, 22 nt, synthetic construct
  source 1..22: mol_type = other RNA
gttatatcaggtaaaacctgtc

SEQ ID NO: 11540 - RNA, 22 nt, synthetic construct
  source 1..22: mol_type = other RNA
gttcacctctgttataaatggt

SEQ ID NO: 11541 - RNA, 22 nt, synthetic construct
  source 1..22: mol_type = other RNA
gttgctgggtctgatggcatac

SEQ ID NO: 11542 - RNA, 22 nt, synthetic construct
  source 1..22: mol_type = other RNA
gttttacctgatataacatcac

SEQ ID NO: 11543 - RNA, 22 nt, synthetic construct
  source 1..22: mol_type = other RNA
gtttttcatgtctactgtgatg

SEQ ID NO: 11544 - RNA, 22 nt, synthetic construct
  source 1..22: mol_type = other RNA
taaatggtggtacattcagcag

SEQ ID NO: 11545 - RNA, 22 nt, synthetic construct
  source 1..22: mol_type = other RNA
taacagaggtgaacatacaagt

SEQ ID NO: 11546 - RNA, 22 nt, synthetic construct
  source 1..22: mol_type = other RNA
taacatcacagtagacatgaaa

SEQ ID NO: 11547 - RNA, 22 nt, synthetic construct
  source 1..22: mol_type = other RNA
taacattttattgattctaggc

SEQ ID NO: 11548 - RNA, 22 nt, synthetic construct
  source 1..22: mol_type = other RNA
tacaagtggcatgtatgccatc

SEQ ID NO: 11549 - RNA, 22 nt, synthetic construct
  source 1..22: mol_type = other RNA
tacatgccacttgtatgttcac

SEQ ID NO: 11550 - RNA, 22 nt, synthetic construct
  source 1..22: mol_type = other RNA
tacattcagcaggaatgcctag

SEQ ID NO: 11551 - RNA, 22 nt, synthetic construct
  source 1..22: mol_type = other RNA
taccaccatttataacagaggt

SEQ ID NO: 11552 - RNA, 22 nt, synthetic construct
  source 1..22: mol_type = other RNA
tacctgatataacatcacagta

SEQ ID NO: 11553 - RNA, 22 nt, synthetic construct
  source 1..22: mol_type = other RNA
tactgtctattctccttagaca

SEQ ID NO: 11554 - RNA, 22 nt, synthetic construct
  source 1..22: mol_type = other RNA
tactgtgatgttatatcaggta

SEQ ID NO: 11555 - RNA, 22 nt, synthetic construct
  source 1..22: mol_type = other RNA
tagacaggttttacctgatata

SEQ ID NO: 11556 - RNA, 22 nt, synthetic construct
  source 1..22: mol_type = other RNA
tagacatgaaaaacttgagagt

SEQ ID NO: 11557 - RNA, 22 nt, synthetic construct
  source 1..22: mol_type = other RNA
taggcattcctgctgaatgtac

SEQ ID NO: 11558 - RNA, 22 nt, synthetic construct
  source 1..22: mol_type = other RNA
tataaatggtggtacattcagc

SEQ ID NO: 11559 - RNA, 22 nt, synthetic construct
  source 1..22: mol_type = other RNA
tataacagaggtgaacatacaa

SEQ ID NO: 11560 - RNA, 22 nt, synthetic construct
  source 1..22: mol_type = other RNA
tataacatcacagtagacatga

SEQ ID NO: 11561 - RNA, 22 nt, synthetic construct
  source 1..22: mol_type = other RNA
tatatcaggtaaaacctgtcta

SEQ ID NO: 11562 - RNA, 22 nt, synthetic construct
  source 1..22: mol_type = other RNA
tatcaggtaaaacctgtctaag

SEQ ID NO: 11563 - RNA, 22 nt, synthetic construct
  source 1..22: mol_type = other RNA
tatgccatcagacccagcaact

SEQ ID NO: 11564 - RNA, 22 nt, synthetic construct
  source 1..22: mol_type = other RNA
tatgttcacctctgttataaat

SEQ ID NO: 11565 - RNA, 22 nt, synthetic construct
  source 1..22: mol_type = other RNA
tattctccttagacaggtttta

SEQ ID NO: 11566 - RNA, 22 nt, synthetic construct
  source 1..22: mol_type = other RNA
tattgattctaggcattcctgc

SEQ ID NO: 11567 - RNA, 22 nt, synthetic construct
  source 1..22: mol_type = other RNA
tcaagtttttcatgtctactgt

SEQ ID NO: 11568 - RNA, 22 nt, synthetic construct
  source 1..22: mol_type = other RNA
tcacagtagacatgaaaaactt

SEQ ID NO: 11569 - RNA, 22 nt, synthetic construct
  source 1..22: mol_type = other RNA
tcacctctgttataaatggtgg

SEQ ID NO: 11570 - RNA, 22 nt, synthetic construct
  source 1..22: mol_type = other RNA
tcagacccagcaactctcaagt

SEQ ID NO: 11571 - RNA, 22 nt, synthetic construct
  source 1..22: mol_type = other RNA
tcagcaggaatgcctagaatca

SEQ ID NO: 11572 - RNA, 22 nt, synthetic construct
  source 1..22: mol_type = other RNA
tcaggtaaaacctgtctaagga

SEQ ID NO: 11573 - RNA, 22 nt, synthetic construct
  source 1..22: mol_type = other RNA
tcatgtctactgtgatgttata

SEQ ID NO: 11574 - RNA, 22 nt, synthetic construct
  source 1..22: mol_type = other RNA
tcctgctgaatgtaccaccatt

SEQ ID NO: 11575 - RNA, 22 nt, synthetic construct
  source 1..22: mol_type = other RNA
tccttagacaggttttacctga

SEQ ID NO: 11576 - RNA, 22 nt, synthetic construct
  source 1..22: mol_type = other RNA
tctactgtgatgttatatcagg

SEQ ID NO: 11577 - RNA, 22 nt, synthetic construct
  source 1..22: mol_type = other RNA
tctaggcattcctgctgaatgt

SEQ ID NO: 11578 - RNA, 22 nt, synthetic construct
  source 1..22: mol_type = other RNA
tctattctccttagacaggttt

SEQ ID NO: 11579 - RNA, 22 nt, synthetic construct
  source 1..22: mol_type = other RNA
tctcaagtttttcatgtctact

SEQ ID NO: 11580 - RNA, 22 nt, synthetic construct
  source 1..22: mol_type = other RNA
tctccttagacaggttttacct

SEQ ID NO: 11581 - RNA, 22 nt, synthetic construct
  source 1..22: mol_type = other RNA
tctgatggcatacatgccactt

SEQ ID NO: 11582 - RNA, 22 nt, synthetic construct
  source 1..22: mol_type = other RNA
tctgttataaatggtggtacat

SEQ ID NO: 11583 - RNA, 22 nt, synthetic construct
  source 1..22: mol_type = other RNA
tgaaaaacttgagagttgctgg

SEQ ID NO: 11584 - RNA, 22 nt, synthetic construct
  source 1..22: mol_type = other RNA
tgaacatacaagtggcatgtat

SEQ ID NO: 11585 - RNA, 22 nt, synthetic construct
  source 1..22: mol_type = other RNA
tgaatgtaccaccatttataac

SEQ ID NO: 11586 - RNA, 22 nt, synthetic construct
  source 1..22: mol_type = other RNA
tgagagttgctgggtctgatgg

SEQ ID NO: 11587 - RNA, 22 nt, synthetic construct
  source 1..22: mol_type = other RNA
tgatataacatcacagtagaca

SEQ ID NO: 11588 - RNA, 22 nt, synthetic construct
  source 1..22: mol_type = other RNA
tgatggcatacatgccacttgt

SEQ ID NO: 11589 - RNA, 22 nt, synthetic construct
  source 1..22: mol_type = other RNA
tgatgttatatcaggtaaaacc

SEQ ID NO: 11590 - RNA, 22 nt, synthetic construct
  source 1..22: mol_type = other RNA
tgattctaggcattcctgctga

SEQ ID NO: 11591 - RNA, 22 nt, synthetic construct
  source 1..22: mol_type = other RNA
tgccacttgtatgttcacctct

SEQ ID NO: 11592 - RNA, 22 nt, synthetic construct
  source 1..22: mol_type = other RNA
tgccatcagacccagcaactct

SEQ ID NO: 11593 - RNA, 22 nt, synthetic construct
  source 1..22: mol_type = other RNA
tgcctagaatcaataaaatgtt

SEQ ID NO: 11594 - RNA, 22 nt, synthetic construct
  source 1..22: mol_type = other RNA
tgctgaatgtaccaccatttat

SEQ ID NO: 11595 - RNA, 22 nt, synthetic construct
  source 1..22: mol_type = other RNA
tgctgggtctgatggcatacat

SEQ ID NO: 11596 - RNA, 22 nt, synthetic construct
  source 1..22: mol_type = other RNA
tggcatacatgccacttgtatg

SEQ ID NO: 11597 - RNA, 22 nt, synthetic construct
  source 1..22: mol_type = other RNA
tggcatgtatgccatcagaccc

SEQ ID NO: 11598 - RNA, 22 nt, synthetic construct
  source 1..22: mol_type = other RNA
tgggtctgatggcatacatgcc

SEQ ID NO: 11599 - RNA, 22 nt, synthetic construct
  source 1..22: mol_type = other RNA
tggtacattcagcaggaatgcc

SEQ ID NO: 11600 - RNA, 22 nt, synthetic construct
  source 1..22: mol_type = other RNA
tggtggtacattcagcaggaat

SEQ ID NO: 11601 - RNA, 22 nt, synthetic construct
  source 1..22: mol_type = other RNA
tgtaccaccatttataacagag

SEQ ID NO: 11602 - RNA, 22 nt, synthetic construct
  source 1..22: mol_type = other RNA
tgtatgccatcagacccagcaa

SEQ ID NO: 11603 - RNA, 22 nt, synthetic construct
  source 1..22: mol_type = other RNA
tgtatgttcacctctgttataa

SEQ ID NO: 11604 - RNA, 22 nt, synthetic construct
  source 1..22: mol_type = other RNA
tgtctactgtgatgttatatca

SEQ ID NO: 11605 - RNA, 22 nt, synthetic construct
  source 1..22: mol_type = other RNA
tgtctattctccttagacaggt

SEQ ID NO: 11606 - RNA, 22 nt, synthetic construct
  source 1..22: mol_type = other RNA
tgtgatgttatatcaggtaaaa

SEQ ID NO: 11607 - RNA, 22 nt, synthetic construct
  source 1..22: mol_type = other RNA
tgttataaatggtggtacattc

SEQ ID NO: 11608 - RNA, 22 nt, synthetic construct
  source 1..22: mol_type = other RNA
tgttatatcaggtaaaacctgt

SEQ ID NO: 11609 - RNA, 22 nt, synthetic construct
  source 1..22: mol_type = other RNA
tgttcacctctgttataaatgg

SEQ ID NO: 11610 - RNA, 22 nt, synthetic construct
  source 1..22: mol_type = other RNA
ttacctgatataacatcacagt

SEQ ID NO: 11611 - RNA, 22 nt, synthetic construct
  source 1..22: mol_type = other RNA
ttagacaggttttacctgatat

SEQ ID NO: 11612 - RNA, 22 nt, synthetic construct
  source 1..22: mol_type = other RNA
ttataaatggtggtacattcag

SEQ ID NO: 11613 - RNA, 22 nt, synthetic construct
  source 1..22: mol_type = other RNA
ttataacagaggtgaacataca

SEQ ID NO: 11614 - RNA, 22 nt, synthetic construct
  source 1..22: mol_type = other RNA
ttatatcaggtaaaacctgtct

SEQ ID NO: 11615 - RNA, 22 nt, synthetic construct
  source 1..22: mol_type = other RNA
ttattgattctaggcattcctg

SEQ ID NO: 11616 - RNA, 22 nt, synthetic construct
  source 1..22: mol_type = other RNA
ttcacctctgttataaatggtg

SEQ ID NO: 11617 - RNA, 22 nt, synthetic construct
  source 1..22: mol_type = other RNA
ttcagcaggaatgcctagaatc

SEQ ID NO: 11618 - RNA, 22 nt, synthetic construct
  source 1..22: mol_type = other RNA
ttcatgtctactgtgatgttat

SEQ ID NO: 11619 - RNA, 22 nt, synthetic construct
  source 1..22: mol_type = other RNA
ttcctgctgaatgtaccaccat

SEQ ID NO: 11620 - RNA, 22 nt, synthetic construct
  source 1..22: mol_type = other RNA
ttctaggcattcctgctgaatg

SEQ ID NO: 11621 - RNA, 22 nt, synthetic construct
  source 1..22: mol_type = other RNA
ttctccttagacaggttttacc

SEQ ID NO: 11622 - RNA, 22 nt, synthetic construct
  source 1..22: mol_type = other RNA
ttgagagttgctgggtctgatg

SEQ ID NO: 11623 - RNA, 22 nt, synthetic construct
  source 1..22: mol_type = other RNA
ttgattctaggcattcctgctg

SEQ ID NO: 11624 - RNA, 22 nt, synthetic construct
  source 1..22: mol_type = other RNA
ttgctgggtctgatggcataca

SEQ ID NO: 11625 - RNA, 22 nt, synthetic construct
  source 1..22: mol_type = other RNA
ttgtatgttcacctctgttata

SEQ ID NO: 11626 - RNA, 22 nt, synthetic construct
  source 1..22: mol_type = other RNA
tttacctgatataacatcacag

SEQ ID NO: 11627 - RNA, 22 nt, synthetic construct
  source 1..22: mol_type = other RNA
tttataacagaggtgaacatac

SEQ ID NO: 11628 - RNA, 22 nt, synthetic construct
  source 1..22: mol_type = other RNA
tttattgattctaggcattcct

SEQ ID NO: 11629 - RNA, 22 nt, synthetic construct
  source 1..22: mol_type = other RNA
tttcatgtctactgtgatgtta

SEQ ID NO: 11630 - RNA, 22 nt, synthetic construct
  source 1..22: mol_type = other RNA
ttttacctgatataacatcaca

SEQ ID NO: 11631 - RNA, 22 nt, synthetic construct
  source 1..22: mol_type = other RNA
ttttattgattctaggcattcc

SEQ ID NO: 11632 - RNA, 22 nt, synthetic construct
  source 1..22: mol_type = other RNA
ttttcatgtctactgtgatgtt

SEQ ID NO: 11633 - RNA, 22 nt, synthetic construct
  source 1..22: mol_type = other RNA
tttttcatgtctactgtgatgt

SEQ ID NO: 11634 - RNA, 20 nt, synthetic construct
  source 1..20: mol_type = other RNA
aaaaatacatgatttcattc

SEQ ID NO: 11635 - RNA, 20 nt, synthetic construct
  source 1..20: mol_type = other RNA
aaaaccatatttgtagttct

SEQ ID NO: 11636 - RNA, 20 nt, synthetic construct
  source 1..20: mol_type = other RNA
aaaacttcaatgaaacgtgg

SEQ ID NO: 11637 - RNA, 20 nt, synthetic construct
  source 1..20: mol_type = other RNA
aaaatacatgatttcattca

SEQ ID NO: 11638 - RNA, 20 nt, synthetic construct
  source 1..20: mol_type = other RNA
aaaccatatttgtagttctc

SEQ ID NO: 11639 - RNA, 20 nt, synthetic construct
  source 1..20: mol_type = other RNA
aaacgtgggagaactacaaa

SEQ ID NO: 11640 - RNA, 20 nt, synthetic construct
  source 1..20: mol_type = other RNA
aaacttcaatgaaacgtggg

SEQ ID NO: 11641 - RNA, 20 nt, synthetic construct
  source 1..20: mol_type = other RNA
aaatacatgatttcattcat

SEQ ID NO: 11642 - RNA, 20 nt, synthetic construct
  source 1..20: mol_type = other RNA
aaatatggttttgggaggct

SEQ ID NO: 11643 - RNA, 20 nt, synthetic construct
  source 1..20: mol_type = other RNA
aacatcgaatagatggatca

SEQ ID NO: 11644 - RNA, 20 nt, synthetic construct
  source 1..20: mol_type = other RNA
aaccatatttgtagttctcc

SEQ ID NO: 11645 - RNA, 20 nt, synthetic construct
  source 1..20: mol_type = other RNA
aacgtgggagaactacaaat

SEQ ID NO: 11646 - RNA, 20 nt, synthetic construct
  source 1..20: mol_type = other RNA
aactacaaatatggttttgg

SEQ ID NO: 11647 - RNA, 20 nt, synthetic construct
  source 1..20: mol_type = other RNA
aacttcaatgaaacgtggga

SEQ ID NO: 11648 - RNA, 20 nt, synthetic construct
  source 1..20: mol_type = other RNA
aagcctcccaaaaccatatt

SEQ ID NO: 11649 - RNA, 20 nt, synthetic construct
  source 1..20: mol_type = other RNA
aaggggactacattcaatca

SEQ ID NO: 11650 - RNA, 20 nt, synthetic construct
  source 1..20: mol_type = other RNA
aagttttgtgatccatctat

SEQ ID NO: 11651 - RNA, 20 nt, synthetic construct
  source 1..20: mol_type = other RNA
aatacatgatttcattcatt

SEQ ID NO: 11652 - RNA, 20 nt, synthetic construct
  source 1..20: mol_type = other RNA
aatagatggatcacaaaact

SEQ ID NO: 11653 - RNA, 20 nt, synthetic construct
  source 1..20: mol_type = other RNA
aatatggttttgggaggctt

SEQ ID NO: 11654 - RNA, 20 nt, synthetic construct
  source 1..20: mol_type = other RNA
aatgaaacgtgggagaacta

SEQ ID NO: 11655 - RNA, 20 nt, synthetic construct
  source 1..20: mol_type = other RNA
aatgaatgattgaatgtagt

SEQ ID NO: 11656 - RNA, 20 nt, synthetic construct
  source 1..20: mol_type = other RNA
aatgattgaatgtagtcccc

SEQ ID NO: 11657 - RNA, 20 nt, synthetic construct
  source 1..20: mol_type = other RNA
aatgtagtccccttaccatc

SEQ ID NO: 11658 - RNA, 20 nt, synthetic construct
  source 1..20: mol_type = other RNA
aatgtccatggactacctga

SEQ ID NO: 11659 - RNA, 20 nt, synthetic construct
  source 1..20: mol_type = other RNA
aattaatgtccatggactac

SEQ ID NO: 11660 - RNA, 20 nt, synthetic construct
  source 1..20: mol_type = other RNA
aattcaacatcgaatagatg

SEQ ID NO: 11661 - RNA, 20 nt, synthetic construct
  source 1..20: mol_type = other RNA
acaaaacttcaatgaaacgt

SEQ ID NO: 11662 - RNA, 20 nt, synthetic construct
  source 1..20: mol_type = other RNA
acaaatatggttttgggagg

SEQ ID NO: 11663 - RNA, 20 nt, synthetic construct
  source 1..20: mol_type = other RNA
acatcgaatagatggatcac

SEQ ID NO: 11664 - RNA, 20 nt, synthetic construct
  source 1..20: mol_type = other RNA
acatgatttcattcattata

SEQ ID NO: 11665 - RNA, 20 nt, synthetic construct
  source 1..20: mol_type = other RNA
acattaattcaacatcgaat

SEQ ID NO: 11666 - RNA, 20 nt, synthetic construct
  source 1..20: mol_type = other RNA
accatatttgtagttctccc

SEQ ID NO: 11667 - RNA, 20 nt, synthetic construct
  source 1..20: mol_type = other RNA
accatcaagcctcccaaaac

SEQ ID NO: 11668 - RNA, 20 nt, synthetic construct
  source 1..20: mol_type = other RNA
acctgaatataatgaatgaa

SEQ ID NO: 11669 - RNA, 20 nt, synthetic construct
  source 1..20: mol_type = other RNA
acgtgggagaactacaaata

SEQ ID NO: 11670 - RNA, 20 nt, synthetic construct
  source 1..20: mol_type = other RNA
acgtttcattgaagttttgt

SEQ ID NO: 11671 - RNA, 20 nt, synthetic construct
  source 1..20: mol_type = other RNA
actacaaatatggttttggg

SEQ ID NO: 11672 - RNA, 20 nt, synthetic construct
  source 1..20: mol_type = other RNA
actacctgaatataatgaat

SEQ ID NO: 11673 - RNA, 20 nt, synthetic construct
  source 1..20: mol_type = other RNA
acttcaatgaaacgtgggag

SEQ ID NO: 11674 - RNA, 20 nt, synthetic construct
  source 1..20: mol_type = other RNA
agaactacaaatatggtttt

SEQ ID NO: 11675 - RNA, 20 nt, synthetic construct
  source 1..20: mol_type = other RNA
agatggatcacaaaacttca

SEQ ID NO: 11676 - RNA, 20 nt, synthetic construct
  source 1..20: mol_type = other RNA
agcctcccaaaaccatattt

SEQ ID NO: 11677 - RNA, 20 nt, synthetic construct
  source 1..20: mol_type = other RNA
aggcttgatggtaaggggac

SEQ ID NO: 11678 - RNA, 20 nt, synthetic construct
  source 1..20: mol_type = other RNA
aggtagtccatggacattaa

SEQ ID NO: 11679 - RNA, 20 nt, synthetic construct
  source 1..20: mol_type = other RNA
agtccatggacattaattca

SEQ ID NO: 11680 - RNA, 20 nt, synthetic construct
  source 1..20: mol_type = other RNA
agtccccttaccatcaagcc

SEQ ID NO: 11681 - RNA, 20 nt, synthetic construct
  source 1..20: mol_type = other RNA
agttctcccacgtttcattg

SEQ ID NO: 11682 - RNA, 20 nt, synthetic construct
  source 1..20: mol_type = other RNA
agttttgtgatccatctatt

SEQ ID NO: 11683 - RNA, 20 nt, synthetic construct
  source 1..20: mol_type = other RNA
atacatgatttcattcatta

SEQ ID NO: 11684 - RNA, 20 nt, synthetic construct
  source 1..20: mol_type = other RNA
atagatggatcacaaaactt

SEQ ID NO: 11685 - RNA, 20 nt, synthetic construct
  source 1..20: mol_type = other RNA
atatggttttgggaggcttg

SEQ ID NO: 11686 - RNA, 20 nt, synthetic construct
  source 1..20: mol_type = other RNA
atattcaggtagtccatgga

SEQ ID NO: 11687 - RNA, 20 nt, synthetic construct
  source 1..20: mol_type = other RNA
atatttgtagttctcccacg

SEQ ID NO: 11688 - RNA, 20 nt, synthetic construct
  source 1..20: mol_type = other RNA
atcaagcctcccaaaaccat

SEQ ID NO: 11689 - RNA, 20 nt, synthetic construct
  source 1..20: mol_type = other RNA
atcacaaaacttcaatgaaa

SEQ ID NO: 11690 - RNA, 20 nt, synthetic construct
  source 1..20: mol_type = other RNA
atccatctattcgatgttga

SEQ ID NO: 11691 - RNA, 20 nt, synthetic construct
  source 1..20: mol_type = other RNA
atcgaatagatggatcacaa

SEQ ID NO: 11692 - RNA, 20 nt, synthetic construct
  source 1..20: mol_type = other RNA
atctattcgatgttgaatta

SEQ ID NO: 11693 - RNA, 20 nt, synthetic construct
  source 1..20: mol_type = other RNA
atgaaacgtgggagaactac

SEQ ID NO: 11694 - RNA, 20 nt, synthetic construct
  source 1..20: mol_type = other RNA
atgaatgattgaatgtagtc

SEQ ID NO: 11695 - RNA, 20 nt, synthetic construct
  source 1..20: mol_type = other RNA
atgattgaatgtagtcccct

SEQ ID NO: 11696 - RNA, 20 nt, synthetic construct
  source 1..20: mol_type = other RNA
atggacattaattcaacatc

SEQ ID NO: 11697 - RNA, 20 nt, synthetic construct
  source 1..20: mol_type = other RNA
atggactacctgaatataat

SEQ ID NO: 11698 - RNA, 20 nt, synthetic construct
  source 1..20: mol_type = other RNA
atggatcacaaaacttcaat

SEQ ID NO: 11699 - RNA, 20 nt, synthetic construct
  source 1..20: mol_type = other RNA
atggtaaggggactacattc

SEQ ID NO: 11700 - RNA, 20 nt, synthetic construct
  source 1..20: mol_type = other RNA
atggttttgggaggcttgat

SEQ ID NO: 11701 - RNA, 20 nt, synthetic construct
  source 1..20: mol_type = other RNA
atgtagtccccttaccatca

SEQ ID NO: 11702 - RNA, 20 nt, synthetic construct
  source 1..20: mol_type = other RNA
atgtccatggactacctgaa

SEQ ID NO: 11703 - RNA, 20 nt, synthetic construct
  source 1..20: mol_type = other RNA
atgttgaattaatgtccatg

SEQ ID NO: 11704 - RNA, 20 nt, synthetic construct
  source 1..20: mol_type = other RNA
attaatgtccatggactacc

SEQ ID NO: 11705 - RNA, 20 nt, synthetic construct
  source 1..20: mol_type = other RNA
attaattcaacatcgaatag

SEQ ID NO: 11706 - RNA, 20 nt, synthetic construct
  source 1..20: mol_type = other RNA
attatattcaggtagtccat

SEQ ID NO: 11707 - RNA, 20 nt, synthetic construct
  source 1..20: mol_type = other RNA
attcaacatcgaatagatgg

SEQ ID NO: 11708 - RNA, 20 nt, synthetic construct
  source 1..20: mol_type = other RNA
attcaggtagtccatggaca

SEQ ID NO: 11709 - RNA, 20 nt, synthetic construct
  source 1..20: mol_type = other RNA
attcattatattcaggtagt

SEQ ID NO: 11710 - RNA, 20 nt, synthetic construct
  source 1..20: mol_type = other RNA
attcgatgttgaattaatgt

SEQ ID NO: 11711 - RNA, 20 nt, synthetic construct
  source 1..20: mol_type = other RNA
attgaagttttgtgatccat

SEQ ID NO: 11712 - RNA, 20 nt, synthetic construct
  source 1..20: mol_type = other RNA
attgaatgtagtccccttac

SEQ ID NO: 11713 - RNA, 20 nt, synthetic construct
  source 1..20: mol_type = other RNA
atttcattcattatattcag

SEQ ID NO: 11714 - RNA, 20 nt, synthetic construct
  source 1..20: mol_type = other RNA
atttgtagttctcccacgtt

SEQ ID NO: 11715 - RNA, 20 nt, synthetic construct
  source 1..20: mol_type = other RNA
caaaaccatatttgtagttc

SEQ ID NO: 11716 - RNA, 20 nt, synthetic construct
  source 1..20: mol_type = other RNA
caaaacttcaatgaaacgtg

SEQ ID NO: 11717 - RNA, 20 nt, synthetic construct
  source 1..20: mol_type = other RNA
caaatatggttttgggaggc

SEQ ID NO: 11718 - RNA, 20 nt, synthetic construct
  source 1..20: mol_type = other RNA
caacatcgaatagatggatc

SEQ ID NO: 11719 - RNA, 20 nt, synthetic construct
  source 1..20: mol_type = other RNA
caagcctcccaaaaccatat

SEQ ID NO: 11720 - RNA, 20 nt, synthetic construct
  source 1..20: mol_type = other RNA
caatgaaacgtgggagaact

SEQ ID NO: 11721 - RNA, 20 nt, synthetic construct
  source 1..20: mol_type = other RNA
cacaaaacttcaatgaaacg

SEQ ID NO: 11722 - RNA, 20 nt, synthetic construct
  source 1..20: mol_type = other RNA
cacgtttcattgaagttttg

SEQ ID NO: 11723 - RNA, 20 nt, synthetic construct
  source 1..20: mol_type = other RNA
caggtagtccatggacatta

SEQ ID NO: 11724 - RNA, 20 nt, synthetic construct
  source 1..20: mol_type = other RNA
catatttgtagttctcccac

SEQ ID NO: 11725 - RNA, 20 nt, synthetic construct
  source 1..20: mol_type = other RNA
catcaagcctcccaaaacca

SEQ ID NO: 11726 - RNA, 20 nt, synthetic construct
  source 1..20: mol_type = other RNA
catcgaatagatggatcaca

SEQ ID NO: 11727 - RNA, 20 nt, synthetic construct
  source 1..20: mol_type = other RNA
catctattcgatgttgaatt

SEQ ID NO: 11728 - RNA, 20 nt, synthetic construct
  source 1..20: mol_type = other RNA
catgatttcattcattatat

SEQ ID NO: 11729 - RNA, 20 nt, synthetic construct
  source 1..20: mol_type = other RNA
catggacattaattcaacat

SEQ ID NO: 11730 - RNA, 20 nt, synthetic construct
  source 1..20: mol_type = other RNA
catggactacctgaatataa

SEQ ID NO: 11731 - RNA, 20 nt, synthetic construct
  source 1..20: mol_type = other RNA
cattaattcaacatcgaata

SEQ ID NO: 11732 - RNA, 20 nt, synthetic construct
  source 1..20: mol_type = other RNA
cattatattcaggtagtcca

SEQ ID NO: 11733 - RNA, 20 nt, synthetic construct
  source 1..20: mol_type = other RNA
cattcattatattcaggtag

SEQ ID NO: 11734 - RNA, 20 nt, synthetic construct
  source 1..20: mol_type = other RNA
cattgaagttttgtgatcca

SEQ ID NO: 11735 - RNA, 20 nt, synthetic construct
  source 1..20: mol_type = other RNA
ccaaaaccatatttgtagtt

SEQ ID NO: 11736 - RNA, 20 nt, synthetic construct
  source 1..20: mol_type = other RNA
ccacgtttcattgaagtttt

SEQ ID NO: 11737 - RNA, 20 nt, synthetic construct
  source 1..20: mol_type = other RNA
ccatatttgtagttctccca

SEQ ID NO: 11738 - RNA, 20 nt, synthetic construct
  source 1..20: mol_type = other RNA
ccatcaagcctcccaaaacc

SEQ ID NO: 11739 - RNA, 20 nt, synthetic construct
  source 1..20: mol_type = other RNA
ccatctattcgatgttgaat

SEQ ID NO: 11740 - RNA, 20 nt, synthetic construct
  source 1..20: mol_type = other RNA
ccatggacattaattcaaca

SEQ ID NO: 11741 - RNA, 20 nt, synthetic construct
  source 1..20: mol_type = other RNA
ccatggactacctgaatata

SEQ ID NO: 11742 - RNA, 20 nt, synthetic construct
  source 1..20: mol_type = other RNA
cccaaaaccatatttgtagt

SEQ ID NO: 11743 - RNA, 20 nt, synthetic construct
  source 1..20: mol_type = other RNA
cccacgtttcattgaagttt

SEQ ID NO: 11744 - RNA, 20 nt, synthetic construct
  source 1..20: mol_type = other RNA
ccccttaccatcaagcctcc

SEQ ID NO: 11745 - RNA, 20 nt, synthetic construct
  source 1..20: mol_type = other RNA
cccttaccatcaagcctccc

SEQ ID NO: 11746 - RNA, 20 nt, synthetic construct
  source 1..20: mol_type = other RNA
cctcccaaaaccatatttgt

SEQ ID NO: 11747 - RNA, 20 nt, synthetic construct
  source 1..20: mol_type = other RNA
cctgaatataatgaatgaaa

SEQ ID NO: 11748 - RNA, 20 nt, synthetic construct
  source 1..20: mol_type = other RNA
ccttaccatcaagcctccca

SEQ ID NO: 11749 - RNA, 20 nt, synthetic construct
  source 1..20: mol_type = other RNA
cgaatagatggatcacaaaa

SEQ ID NO: 11750 - RNA, 20 nt, synthetic construct
  source 1..20: mol_type = other RNA
cgatgttgaattaatgtcca

SEQ ID NO: 11751 - RNA, 20 nt, synthetic construct
  source 1..20: mol_type = other RNA
cgtgggagaactacaaatat

SEQ ID NO: 11752 - RNA, 20 nt, synthetic construct
  source 1..20: mol_type = other RNA
cgtttcattgaagttttgtg

SEQ ID NO: 11753 - RNA, 20 nt, synthetic construct
  source 1..20: mol_type = other RNA
ctacaaatatggttttggga

SEQ ID NO: 11754 - RNA, 20 nt, synthetic construct
  source 1..20: mol_type = other RNA
ctacctgaatataatgaatg

SEQ ID NO: 11755 - RNA, 20 nt, synthetic construct
  source 1..20: mol_type = other RNA
ctattcgatgttgaattaat

SEQ ID NO: 11756 - RNA, 20 nt, synthetic construct
  source 1..20: mol_type = other RNA
ctcccaaaaccatatttgta

SEQ ID NO: 11757 - RNA, 20 nt, synthetic construct
  source 1..20: mol_type = other RNA
ctcccacgtttcattgaagt

SEQ ID NO: 11758 - RNA, 20 nt, synthetic construct
  source 1..20: mol_type = other RNA
ctgaatataatgaatgaaat

SEQ ID NO: 11759 - RNA, 20 nt, synthetic construct
  source 1..20: mol_type = other RNA
cttaccatcaagcctcccaa

SEQ ID NO: 11760 - RNA, 20 nt, synthetic construct
  source 1..20: mol_type = other RNA
cttcaatgaaacgtgggaga

SEQ ID NO: 11761 - RNA, 20 nt, synthetic construct
  source 1..20: mol_type = other RNA
cttgatggtaaggggactac

SEQ ID NO: 11762 - RNA, 20 nt, synthetic construct
  source 1..20: mol_type = other RNA
gaaacgtgggagaactacaa

SEQ ID NO: 11763 - RNA, 20 nt, synthetic construct
  source 1..20: mol_type = other RNA
gaactacaaatatggttttg

SEQ ID NO: 11764 - RNA, 20 nt, synthetic construct
  source 1..20: mol_type = other RNA
gaagttttgtgatccatcta

SEQ ID NO: 11765 - RNA, 20 nt, synthetic construct
  source 1..20: mol_type = other RNA
gaatagatggatcacaaaac

SEQ ID NO: 11766 - RNA, 20 nt, synthetic construct
  source 1..20: mol_type = other RNA
gaatataatgaatgaaatca

SEQ ID NO: 11767 - RNA, 20 nt, synthetic construct
  source 1..20: mol_type = other RNA
gaatgaatgattgaatgtag

SEQ ID NO: 11768 - RNA, 20 nt, synthetic construct
  source 1..20: mol_type = other RNA
gaatgattgaatgtagtccc

SEQ ID NO: 11769 - RNA, 20 nt, synthetic construct
  source 1..20: mol_type = other RNA
gaatgtagtccccttaccat

SEQ ID NO: 11770 - RNA, 20 nt, synthetic construct
  source 1..20: mol_type = other RNA
gaattaatgtccatggacta

SEQ ID NO: 11771 - RNA, 20 nt, synthetic construct
  source 1..20: mol_type = other RNA
gacattaattcaacatcgaa

SEQ ID NO: 11772 - RNA, 20 nt, synthetic construct
  source 1..20: mol_type = other RNA
gactacctgaatataatgaa

SEQ ID NO: 11773 - RNA, 20 nt, synthetic construct
  source 1..20: mol_type = other RNA
gagaactacaaatatggttt

SEQ ID NO: 11774 - RNA, 20 nt, synthetic construct
  source 1..20: mol_type = other RNA
gaggcttgatggtaagggga

SEQ ID NO: 11775 - RNA, 20 nt, synthetic construct
  source 1..20: mol_type = other RNA
gatcacaaaacttcaatgaa

SEQ ID NO: 11776 - RNA, 20 nt, synthetic construct
  source 1..20: mol_type = other RNA
gatccatctattcgatgttg

SEQ ID NO: 11777 - RNA, 20 nt, synthetic construct
  source 1..20: mol_type = other RNA
gatggatcacaaaacttcaa

SEQ ID NO: 11778 - RNA, 20 nt, synthetic construct
  source 1..20: mol_type = other RNA
gatggtaaggggactacatt

SEQ ID NO: 11779 - RNA, 20 nt, synthetic construct
  source 1..20: mol_type = other RNA
gatgttgaattaatgtccat

SEQ ID NO: 11780 - RNA, 20 nt, synthetic construct
  source 1..20: mol_type = other RNA
gattgaatgtagtcccctta

SEQ ID NO: 11781 - RNA, 20 nt, synthetic construct
  source 1..20: mol_type = other RNA
gatttcattcattatattca

SEQ ID NO: 11782 - RNA, 20 nt, synthetic construct
  source 1..20: mol_type = other RNA
gcctcccaaaaccatatttg

SEQ ID NO: 11783 - RNA, 20 nt, synthetic construct
  source 1..20: mol_type = other RNA
gcttgatggtaaggggacta

SEQ ID NO: 11784 - RNA, 20 nt, synthetic construct
  source 1..20: mol_type = other RNA
ggacattaattcaacatcga

SEQ ID NO: 11785 - RNA, 20 nt, synthetic construct
  source 1..20: mol_type = other RNA
ggactacctgaatataatga

SEQ ID NO: 11786 - RNA, 20 nt, synthetic construct
  source 1..20: mol_type = other RNA
ggagaactacaaatatggtt

SEQ ID NO: 11787 - RNA, 20 nt, synthetic construct
  source 1..20: mol_type = other RNA
ggaggcttgatggtaagggg

SEQ ID NO: 11788 - RNA, 20 nt, synthetic construct
  source 1..20: mol_type = other RNA
ggatcacaaaacttcaatga

SEQ ID NO: 11789 - RNA, 20 nt, synthetic construct
  source 1..20: mol_type = other RNA
ggcttgatggtaaggggact

SEQ ID NO: 11790 - RNA, 20 nt, synthetic construct
  source 1..20: mol_type = other RNA
gggagaactacaaatatggt

SEQ ID NO: 11791 - RNA, 20 nt, synthetic construct
  source 1..20: mol_type = other RNA
gggaggcttgatggtaaggg

SEQ ID NO: 11792 - RNA, 20 nt, synthetic construct
  source 1..20: mol_type = other RNA
ggtaaggggactacattcaa

SEQ ID NO: 11793 - RNA, 20 nt, synthetic construct
  source 1..20: mol_type = other RNA
ggtagtccatggacattaat

SEQ ID NO: 11794 - RNA, 20 nt, synthetic construct
  source 1..20: mol_type = other RNA
ggttttgggaggcttgatgg

SEQ ID NO: 11795 - RNA, 20 nt, synthetic construct
  source 1..20: mol_type = other RNA
gtaaggggactacattcaat

SEQ ID NO: 11796 - RNA, 20 nt, synthetic construct
  source 1..20: mol_type = other RNA
gtagtccatggacattaatt

SEQ ID NO: 11797 - RNA, 20 nt, synthetic construct
  source 1..20: mol_type = other RNA
gtagtccccttaccatcaag

SEQ ID NO: 11798 - RNA, 20 nt, synthetic construct
  source 1..20: mol_type = other RNA
gtagttctcccacgtttcat

SEQ ID NO: 11799 - RNA, 20 nt, synthetic construct
  source 1..20: mol_type = other RNA
gtccatggacattaattcaa

SEQ ID NO: 11800 - RNA, 20 nt, synthetic construct
  source 1..20: mol_type = other RNA
gtccatggactacctgaata

SEQ ID NO: 11801 - RNA, 20 nt, synthetic construct
  source 1..20: mol_type = other RNA
gtccccttaccatcaagcct

SEQ ID NO: 11802 - RNA, 20 nt, synthetic construct
  source 1..20: mol_type = other RNA
gtgatccatctattcgatgt

SEQ ID NO: 11803 - RNA, 20 nt, synthetic construct
  source 1..20: mol_type = other RNA
gtgggagaactacaaatatg

SEQ ID NO: 11804 - RNA, 20 nt, synthetic construct
  source 1..20: mol_type = other RNA
gttctcccacgtttcattga

SEQ ID NO: 11805 - RNA, 20 nt, synthetic construct
  source 1..20: mol_type = other RNA
gttgaattaatgtccatgga

SEQ ID NO: 11806 - RNA, 20 nt, synthetic construct
  source 1..20: mol_type = other RNA
gtttcattgaagttttgtga

SEQ ID NO: 11807 - RNA, 20 nt, synthetic construct
  source 1..20: mol_type = other RNA
gttttgggaggcttgatggt

SEQ ID NO: 11808 - RNA, 20 nt, synthetic construct
  source 1..20: mol_type = other RNA
gttttgtgatccatctattc

SEQ ID NO: 11809 - RNA, 20 nt, synthetic construct
  source 1..20: mol_type = other RNA
taaggggactacattcaatc

SEQ ID NO: 11810 - RNA, 20 nt, synthetic construct
  source 1..20: mol_type = other RNA
taatgtccatggactacctg

SEQ ID NO: 11811 - RNA, 20 nt, synthetic construct
  source 1..20: mol_type = other RNA
taattcaacatcgaatagat

SEQ ID NO: 11812 - RNA, 20 nt, synthetic construct
  source 1..20: mol_type = other RNA
tacaaatatggttttgggag

SEQ ID NO: 11813 - RNA, 20 nt, synthetic construct
  source 1..20: mol_type = other RNA
tacatgatttcattcattat

SEQ ID NO: 11814 - RNA, 20 nt, synthetic construct
  source 1..20: mol_type = other RNA
taccatcaagcctcccaaaa

SEQ ID NO: 11815 - RNA, 20 nt, synthetic construct
  source 1..20: mol_type = other RNA
tacctgaatataatgaatga

SEQ ID NO: 11816 - RNA, 20 nt, synthetic construct
  source 1..20: mol_type = other RNA
tagatggatcacaaaacttc

SEQ ID NO: 11817 - RNA, 20 nt, synthetic construct
  source 1..20: mol_type = other RNA
tagtccatggacattaattc

SEQ ID NO: 11818 - RNA, 20 nt, synthetic construct
  source 1..20: mol_type = other RNA
tagtccccttaccatcaagc

SEQ ID NO: 11819 - RNA, 20 nt, synthetic construct
  source 1..20: mol_type = other RNA
tagttctcccacgtttcatt

SEQ ID NO: 11820 - RNA, 20 nt, synthetic construct
  source 1..20: mol_type = other RNA
tatattcaggtagtccatgg

SEQ ID NO: 11821 - RNA, 20 nt, synthetic construct
  source 1..20: mol_type = other RNA
tatggttttgggaggcttga

SEQ ID NO: 11822 - RNA, 20 nt, synthetic construct
  source 1..20: mol_type = other RNA
tattcaggtagtccatggac

SEQ ID NO: 11823 - RNA, 20 nt, synthetic construct
  source 1..20: mol_type = other RNA
tattcgatgttgaattaatg

SEQ ID NO: 11824 - RNA, 20 nt, synthetic construct
  source 1..20: mol_type = other RNA
tatttgtagttctcccacgt

SEQ ID NO: 11825 - RNA, 20 nt, synthetic construct
  source 1..20: mol_type = other RNA
tcaacatcgaatagatggat

SEQ ID NO: 11826 - RNA, 20 nt, synthetic construct
  source 1..20: mol_type = other RNA
tcaagcctcccaaaaccata

SEQ ID NO: 11827 - RNA, 20 nt, synthetic construct
  source 1..20: mol_type = other RNA
tcaatgaaacgtgggagaac

SEQ ID NO: 11828 - RNA, 20 nt, synthetic construct
  source 1..20: mol_type = other RNA
tcacaaaacttcaatgaaac

SEQ ID NO: 11829 - RNA, 20 nt, synthetic construct
  source 1..20: mol_type = other RNA
tcaggtagtccatggacatt

SEQ ID NO: 11830 - RNA, 20 nt, synthetic construct
  source 1..20: mol_type = other RNA
tcattatattcaggtagtcc

SEQ ID NO: 11831 - RNA, 20 nt, synthetic construct
  source 1..20: mol_type = other RNA
tcattcattatattcaggta

SEQ ID NO: 11832 - RNA, 20 nt, synthetic construct
  source 1..20: mol_type = other RNA
tcattgaagttttgtgatcc

SEQ ID NO: 11833 - RNA, 20 nt, synthetic construct
  source 1..20: mol_type = other RNA
tccatctattcgatgttgaa

SEQ ID NO: 11834 - RNA, 20 nt, synthetic construct
  source 1..20: mol_type = other RNA
tccatggacattaattcaac

SEQ ID NO: 11835 - RNA, 20 nt, synthetic construct
  source 1..20: mol_type = other RNA
tccatggactacctgaatat

SEQ ID NO: 11836 - RNA, 20 nt, synthetic construct
  source 1..20: mol_type = other RNA
tcccaaaaccatatttgtag

SEQ ID NO: 11837 - RNA, 20 nt, synthetic construct
  source 1..20: mol_type = other RNA
tcccacgtttcattgaagtt

SEQ ID NO: 11838 - RNA, 20 nt, synthetic construct
  source 1..20: mol_type = other RNA
tccccttaccatcaagcctc

SEQ ID NO: 11839 - RNA, 20 nt, synthetic construct
  source 1..20: mol_type = other RNA
tcgaatagatggatcacaaa

SEQ ID NO: 11840 - RNA, 20 nt, synthetic construct
  source 1..20: mol_type = other RNA
tcgatgttgaattaatgtcc

SEQ ID NO: 11841 - RNA, 20 nt, synthetic construct
  source 1..20: mol_type = other RNA
tctattcgatgttgaattaa

SEQ ID NO: 11842 - RNA, 20 nt, synthetic construct
  source 1..20: mol_type = other RNA
tctcccacgtttcattgaag

SEQ ID NO: 11843 - RNA, 20 nt, synthetic construct
  source 1..20: mol_type = other RNA
tgaaacgtgggagaactaca

SEQ ID NO: 11844 - RNA, 20 nt, synthetic construct
  source 1..20: mol_type = other RNA
tgaagttttgtgatccatct

SEQ ID NO: 11845 - RNA, 20 nt, synthetic construct
  source 1..20: mol_type = other RNA
tgaatataatgaatgaaatc

SEQ ID NO: 11846 - RNA, 20 nt, synthetic construct
  source 1..20: mol_type = other RNA
tgaatgaatgattgaatgta

SEQ ID NO: 11847 - RNA, 20 nt, synthetic construct
  source 1..20: mol_type = other RNA
tgaatgattgaatgtagtcc

SEQ ID NO: 11848 - RNA, 20 nt, synthetic construct
  source 1..20: mol_type = other RNA
tgaatgtagtccccttacca

SEQ ID NO: 11849 - RNA, 20 nt, synthetic construct
  source 1..20: mol_type = other RNA
tgaattaatgtccatggact

SEQ ID NO: 11850 - RNA, 20 nt, synthetic construct
  source 1..20: mol_type = other RNA
tgatccatctattcgatgtt

SEQ ID NO: 11851 - RNA, 20 nt, synthetic construct
  source 1..20: mol_type = other RNA
tgatggtaaggggactacat

SEQ ID NO: 11852 - RNA, 20 nt, synthetic construct
  source 1..20: mol_type = other RNA
tgattgaatgtagtcccctt

SEQ ID NO: 11853 - RNA, 20 nt, synthetic construct
  source 1..20: mol_type = other RNA
tgatttcattcattatattc

SEQ ID NO: 11854 - RNA, 20 nt, synthetic construct
  source 1..20: mol_type = other RNA
tggacattaattcaacatcg

SEQ ID NO: 11855 - RNA, 20 nt, synthetic construct
  source 1..20: mol_type = other RNA
tggactacctgaatataatg

SEQ ID NO: 11856 - RNA, 20 nt, synthetic construct
  source 1..20: mol_type = other RNA
tggatcacaaaacttcaatg

SEQ ID NO: 11857 - RNA, 20 nt, synthetic construct
  source 1..20: mol_type = other RNA
tgggagaactacaaatatgg

SEQ ID NO: 11858 - RNA, 20 nt, synthetic construct
  source 1..20: mol_type = other RNA
tgggaggcttgatggtaagg

SEQ ID NO: 11859 - RNA, 20 nt, synthetic construct
  source 1..20: mol_type = other RNA
tggtaaggggactacattca

SEQ ID NO: 11860 - RNA, 20 nt, synthetic construct
  source 1..20: mol_type = other RNA
tggttttgggaggcttgatg

SEQ ID NO: 11861 - RNA, 20 nt, synthetic construct
  source 1..20: mol_type = other RNA
tgtagtccccttaccatcaa

SEQ ID NO: 11862 - RNA, 20 nt, synthetic construct
  source 1..20: mol_type = other RNA
tgtagttctcccacgtttca

SEQ ID NO: 11863 - RNA, 20 nt, synthetic construct
  source 1..20: mol_type = other RNA
tgtccatggactacctgaat

SEQ ID NO: 11864 - RNA, 20 nt, synthetic construct
  source 1..20: mol_type = other RNA
tgtgatccatctattcgatg

SEQ ID NO: 11865 - RNA, 20 nt, synthetic construct
  source 1..20: mol_type = other RNA
tgttgaattaatgtccatgg

SEQ ID NO: 11866 - RNA, 20 nt, synthetic construct
  source 1..20: mol_type = other RNA
ttaatgtccatggactacct

SEQ ID NO: 11867 - RNA, 20 nt, synthetic construct
  source 1..20: mol_type = other RNA
ttaattcaacatcgaataga

SEQ ID NO: 11868 - RNA, 20 nt, synthetic construct
  source 1..20: mol_type = other RNA
ttaccatcaagcctcccaaa

SEQ ID NO: 11869 - RNA, 20 nt, synthetic construct
  source 1..20: mol_type = other RNA
ttatattcaggtagtccatg

SEQ ID NO: 11870 - RNA, 20 nt, synthetic construct
  source 1..20: mol_type = other RNA
ttcaacatcgaatagatgga

SEQ ID NO: 11871 - RNA, 20 nt, synthetic construct
  source 1..20: mol_type = other RNA
ttcaatgaaacgtgggagaa

SEQ ID NO: 11872 - RNA, 20 nt, synthetic construct
  source 1..20: mol_type = other RNA
ttcaggtagtccatggacat

SEQ ID NO: 11873 - RNA, 20 nt, synthetic construct
  source 1..20: mol_type = other RNA
ttcattatattcaggtagtc

SEQ ID NO: 11874 - RNA, 20 nt, synthetic construct
  source 1..20: mol_type = other RNA
ttcattcattatattcaggt

SEQ ID NO: 11875 - RNA, 20 nt, synthetic construct
  source 1..20: mol_type = other RNA
ttcattgaagttttgtgatc

SEQ ID NO: 11876 - RNA, 20 nt, synthetic construct
  source 1..20: mol_type = other RNA
ttcgatgttgaattaatgtc

SEQ ID NO: 11877 - RNA, 20 nt, synthetic construct
  source 1..20: mol_type = other RNA
ttctcccacgtttcattgaa

SEQ ID NO: 11878 - RNA, 20 nt, synthetic construct
  source 1..20: mol_type = other RNA
ttgaagttttgtgatccatc

SEQ ID NO: 11879 - RNA, 20 nt, synthetic construct
  source 1..20: mol_type = other RNA
ttgaatgtagtccccttacc

SEQ ID NO: 11880 - RNA, 20 nt, synthetic construct
  source 1..20: mol_type = other RNA
ttgaattaatgtccatggac

SEQ ID NO: 11881 - RNA, 20 nt, synthetic construct
  source 1..20: mol_type = other RNA
ttgatggtaaggggactaca

SEQ ID NO: 11882 - RNA, 20 nt, synthetic construct
  source 1..20: mol_type = other RNA
ttgggaggcttgatggtaag

SEQ ID NO: 11883 - RNA, 20 nt, synthetic construct
  source 1..20: mol_type = other RNA
ttgtagttctcccacgtttc

SEQ ID NO: 11884 - RNA, 20 nt, synthetic construct
  source 1..20: mol_type = other RNA
ttgtgatccatctattcgat

SEQ ID NO: 11885 - RNA, 20 nt, synthetic construct
  source 1..20: mol_type = other RNA
tttcattcattatattcagg

SEQ ID NO: 11886 - RNA, 20 nt, synthetic construct
  source 1..20: mol_type = other RNA
tttcattgaagttttgtgat

SEQ ID NO: 11887 - RNA, 20 nt, synthetic construct
  source 1..20: mol_type = other RNA
tttgggaggcttgatggtaa

SEQ ID NO: 11888 - RNA, 20 nt, synthetic construct
  source 1..20: mol_type = other RNA
tttgtagttctcccacgttt

SEQ ID NO: 11889 - RNA, 20 nt, synthetic construct
  source 1..20: mol_type = other RNA
tttgtgatccatctattcga

SEQ ID NO: 11890 - RNA, 20 nt, synthetic construct
  source 1..20: mol_type = other RNA
ttttgggaggcttgatggta

SEQ ID NO: 11891 - RNA, 20 nt, synthetic construct
  source 1..20: mol_type = other RNA
ttttgtgatccatctattcg

SEQ ID NO: 11892 - RNA, 21 nt, synthetic construct
  source 1..21: mol_type = other RNA
aaaaccatatttgtagttctc

SEQ ID NO: 11893 - RNA, 21 nt, synthetic construct
  source 1..21: mol_type = other RNA
aaaacttcaatgaaacgtggg

SEQ ID NO: 11894 - RNA, 21 nt, synthetic construct
  source 1..21: mol_type = other RNA
aaaccatatttgtagttctcc

SEQ ID NO: 11895 - RNA, 21 nt, synthetic construct
  source 1..21: mol_type = other RNA
aaacgtgggagaactacaaat

SEQ ID NO: 11896 - RNA, 21 nt, synthetic construct
  source 1..21: mol_type = other RNA
aaacttcaatgaaacgtggga

SEQ ID NO: 11897 - RNA, 21 nt, synthetic construct
  source 1..21: mol_type = other RNA
aaatatggttttgggaggctt

SEQ ID NO: 11898 - RNA, 21 nt, synthetic construct
  source 1..21: mol_type = other RNA
aacatcgaatagatggatcac

SEQ ID NO: 11899 - RNA, 21 nt, synthetic construct
  source 1..21: mol_type = other RNA
aaccatatttgtagttctccc

SEQ ID NO: 11900 - RNA, 21 nt, synthetic construct
  source 1..21: mol_type = other RNA
aacgtgggagaactacaaata

SEQ ID NO: 11901 - RNA, 21 nt, synthetic construct
  source 1..21: mol_type = other RNA
aactacaaatatggttttggg

SEQ ID NO: 11902 - RNA, 21 nt, synthetic construct
  source 1..21: mol_type = other RNA
aacttcaatgaaacgtgggag

SEQ ID NO: 11903 - RNA, 21 nt, synthetic construct
  source 1..21: mol_type = other RNA
aagcctcccaaaaccatattt

SEQ ID NO: 11904 - RNA, 21 nt, synthetic construct
  source 1..21: mol_type = other RNA
aagttttgtgatccatctatt

SEQ ID NO: 11905 - RNA, 21 nt, synthetic construct
  source 1..21: mol_type = other RNA
aatagatggatcacaaaactt

SEQ ID NO: 11906 - RNA, 21 nt, synthetic construct
  source 1..21: mol_type = other RNA
aatatggttttgggaggcttg

SEQ ID NO: 11907 - RNA, 21 nt, synthetic construct
  source 1..21: mol_type = other RNA
aatgaaacgtgggagaactac

SEQ ID NO: 11908 - RNA, 21 nt, synthetic construct
  source 1..21: mol_type = other RNA
aatgaatgattgaatgtagtc

SEQ ID NO: 11909 - RNA, 21 nt, synthetic construct
  source 1..21: mol_type = other RNA
aatgattgaatgtagtcccct

SEQ ID NO: 11910 - RNA, 21 nt, synthetic construct
  source 1..21: mol_type = other RNA
aatgtagtccccttaccatca

SEQ ID NO: 11911 - RNA, 21 nt, synthetic construct
  source 1..21: mol_type = other RNA
aatgtccatggactacctgaa

SEQ ID NO: 11912 - RNA, 21 nt, synthetic construct
  source 1..21: mol_type = other RNA
aattaatgtccatggactacc

SEQ ID NO: 11913 - RNA, 21 nt, synthetic construct
  source 1..21: mol_type = other RNA
aattcaacatcgaatagatgg

SEQ ID NO: 11914 - RNA, 21 nt, synthetic construct
  source 1..21: mol_type = other RNA
acaaaacttcaatgaaacgtg

SEQ ID NO: 11915 - RNA, 21 nt, synthetic construct
  source 1..21: mol_type = other RNA
acaaatatggttttgggaggc

SEQ ID NO: 11916 - RNA, 21 nt, synthetic construct
  source 1..21: mol_type = other RNA
acatcgaatagatggatcaca

SEQ ID NO: 11917 - RNA, 21 nt, synthetic construct
  source 1..21: mol_type = other RNA
acattaattcaacatcgaata

SEQ ID NO: 11918 - RNA, 21 nt, synthetic construct
  source 1..21: mol_type = other RNA
accatatttgtagttctccca

SEQ ID NO: 11919 - RNA, 21 nt, synthetic construct
  source 1..21: mol_type = other RNA
accatcaagcctcccaaaacc

SEQ ID NO: 11920 - RNA, 21 nt, synthetic construct
  source 1..21: mol_type = other RNA
acctgaatataatgaatgaaa

SEQ ID NO: 11921 - RNA, 21 nt, synthetic construct
  source 1..21: mol_type = other RNA
acgtgggagaactacaaatat

SEQ ID NO: 11922 - RNA, 21 nt, synthetic construct
  source 1..21: mol_type = other RNA
acgtttcattgaagttttgtg

SEQ ID NO: 11923 - RNA, 21 nt, synthetic construct
  source 1..21: mol_type = other RNA
actacaaatatggttttggga

SEQ ID NO: 11924 - RNA, 21 nt, synthetic construct
  source 1..21: mol_type = other RNA
actacctgaatataatgaatg

SEQ ID NO: 11925 - RNA, 21 nt, synthetic construct
  source 1..21: mol_type = other RNA
acttcaatgaaacgtgggaga

SEQ ID NO: 11926 - RNA, 21 nt, synthetic construct
  source 1..21: mol_type = other RNA
agaactacaaatatggttttg

SEQ ID NO: 11927 - RNA, 21 nt, synthetic construct
  source 1..21: mol_type = other RNA
agatggatcacaaaacttcaa

SEQ ID NO: 11928 - RNA, 21 nt, synthetic construct
  source 1..21: mol_type = other RNA
agcctcccaaaaccatatttg

SEQ ID NO: 11929 - RNA, 21 nt, synthetic construct
  source 1..21: mol_type = other RNA
aggcttgatggtaaggggact

SEQ ID NO: 11930 - RNA, 21 nt, synthetic construct
  source 1..21: mol_type = other RNA
aggtagtccatggacattaat

SEQ ID NO: 11931 - RNA, 21 nt, synthetic construct
  source 1..21: mol_type = other RNA
agtccatggacattaattcaa

SEQ ID NO: 11932 - RNA, 21 nt, synthetic construct
  source 1..21: mol_type = other RNA
agtccccttaccatcaagcct

SEQ ID NO: 11933 - RNA, 21 nt, synthetic construct
  source 1..21: mol_type = other RNA
agttctcccacgtttcattga

SEQ ID NO: 11934 - RNA, 21 nt, synthetic construct
  source 1..21: mol_type = other RNA
agttttgtgatccatctattc

SEQ ID NO: 11935 - RNA, 21 nt, synthetic construct
  source 1..21: mol_type = other RNA
atagatggatcacaaaacttc

SEQ ID NO: 11936 - RNA, 21 nt, synthetic construct
  source 1..21: mol_type = other RNA
atatggttttgggaggcttga

SEQ ID NO: 11937 - RNA, 21 nt, synthetic construct
  source 1..21: mol_type = other RNA
atattcaggtagtccatggac

SEQ ID NO: 11938 - RNA, 21 nt, synthetic construct
  source 1..21: mol_type = other RNA
atatttgtagttctcccacgt

SEQ ID NO: 11939 - RNA, 21 nt, synthetic construct
  source 1..21: mol_type = other RNA
atcaagcctcccaaaaccata

SEQ ID NO: 11940 - RNA, 21 nt, synthetic construct
  source 1..21: mol_type = other RNA
atcacaaaacttcaatgaaac

SEQ ID NO: 11941 - RNA, 21 nt, synthetic construct
  source 1..21: mol_type = other RNA
atccatctattcgatgttgaa

SEQ ID NO: 11942 - RNA, 21 nt, synthetic construct
  source 1..21: mol_type = other RNA
atcgaatagatggatcacaaa

SEQ ID NO: 11943 - RNA, 21 nt, synthetic construct
  source 1..21: mol_type = other RNA
atctattcgatgttgaattaa

SEQ ID NO: 11944 - RNA, 21 nt, synthetic construct
  source 1..21: mol_type = other RNA
atgaaacgtgggagaactaca

SEQ ID NO: 11945 - RNA, 21 nt, synthetic construct
  source 1..21: mol_type = other RNA
atgaatgattgaatgtagtcc

SEQ ID NO: 11946 - RNA, 21 nt, synthetic construct
  source 1..21: mol_type = other RNA
atgattgaatgtagtcccctt

SEQ ID NO: 11947 - RNA, 21 nt, synthetic construct
  source 1..21: mol_type = other RNA
atggacattaattcaacatcg

SEQ ID NO: 11948 - RNA, 21 nt, synthetic construct
  source 1..21: mol_type = other RNA
atggactacctgaatataatg

SEQ ID NO: 11949 - RNA, 21 nt, synthetic construct
  source 1..21: mol_type = other RNA
atggatcacaaaacttcaatg

SEQ ID NO: 11950 - RNA, 21 nt, synthetic construct
  source 1..21: mol_type = other RNA
atggtaaggggactacattca

SEQ ID NO: 11951 - RNA, 21 nt, synthetic construct
  source 1..21: mol_type = other RNA
atggttttgggaggcttgatg

SEQ ID NO: 11952 - RNA, 21 nt, synthetic construct
  source 1..21: mol_type = other RNA
atgtagtccccttaccatcaa

SEQ ID NO: 11953 - RNA, 21 nt, synthetic construct
  source 1..21: mol_type = other RNA
atgtccatggactacctgaat

SEQ ID NO: 11954 - RNA, 21 nt, synthetic construct
  source 1..21: mol_type = other RNA
atgttgaattaatgtccatgg

SEQ ID NO: 11955 - RNA, 21 nt, synthetic construct
  source 1..21: mol_type = other RNA
attaatgtccatggactacct

SEQ ID NO: 11956 - RNA, 21 nt, synthetic construct
  source 1..21: mol_type = other RNA
attaattcaacatcgaataga

SEQ ID NO: 11957 - RNA, 21 nt, synthetic construct
  source 1..21: mol_type = other RNA
attatattcaggtagtccatg

SEQ ID NO: 11958 - RNA, 21 nt, synthetic construct
  source 1..21: mol_type = other RNA
attcaacatcgaatagatgga

SEQ ID NO: 11959 - RNA, 21 nt, synthetic construct
  source 1..21: mol_type = other RNA
attcaggtagtccatggacat

SEQ ID NO: 11960 - RNA, 21 nt, synthetic construct
  source 1..21: mol_type = other RNA
attcattatattcaggtagtc

SEQ ID NO: 11961 - RNA, 21 nt, synthetic construct
  source 1..21: mol_type = other RNA
attcgatgttgaattaatgtc

SEQ ID NO: 11962 - RNA, 21 nt, synthetic construct
  source 1..21: mol_type = other RNA
attgaagttttgtgatccatc

SEQ ID NO: 11963 - RNA, 21 nt, synthetic construct
  source 1..21: mol_type = other RNA
attgaatgtagtccccttacc

SEQ ID NO: 11964 - RNA, 21 nt, synthetic construct
  source 1..21: mol_type = other RNA
atttcattcattatattcagg

SEQ ID NO: 11965 - RNA, 21 nt, synthetic construct
  source 1..21: mol_type = other RNA
atttgtagttctcccacgttt

SEQ ID NO: 11966 - RNA, 21 nt, synthetic construct
  source 1..21: mol_type = other RNA
caaaaccatatttgtagttct

SEQ ID NO: 11967 - RNA, 21 nt, synthetic construct
  source 1..21: mol_type = other RNA
caaaacttcaatgaaacgtgg

SEQ ID NO: 11968 - RNA, 21 nt, synthetic construct
  source 1..21: mol_type = other RNA
caaatatggttttgggaggct

SEQ ID NO: 11969 - RNA, 21 nt, synthetic construct
  source 1..21: mol_type = other RNA
caacatcgaatagatggatca

SEQ ID NO: 11970 - RNA, 21 nt, synthetic construct
  source 1..21: mol_type = other RNA
caagcctcccaaaaccatatt

SEQ ID NO: 11971 - RNA, 21 nt, synthetic construct
  source 1..21: mol_type = other RNA
caatgaaacgtgggagaacta

SEQ ID NO: 11972 - RNA, 21 nt, synthetic construct
  source 1..21: mol_type = other RNA
cacaaaacttcaatgaaacgt

SEQ ID NO: 11973 - RNA, 21 nt, synthetic construct
  source 1..21: mol_type = other RNA
cacgtttcattgaagttttgt

SEQ ID NO: 11974 - RNA, 21 nt, synthetic construct
  source 1..21: mol_type = other RNA
caggtagtccatggacattaa

SEQ ID NO: 11975 - RNA, 21 nt, synthetic construct
  source 1..21: mol_type = other RNA
catatttgtagttctcccacg

SEQ ID NO: 11976 - RNA, 21 nt, synthetic construct
  source 1..21: mol_type = other RNA
catcaagcctcccaaaaccat

SEQ ID NO: 11977 - RNA, 21 nt, synthetic construct
  source 1..21: mol_type = other RNA
catcgaatagatggatcacaa

SEQ ID NO: 11978 - RNA, 21 nt, synthetic construct
  source 1..21: mol_type = other RNA
catctattcgatgttgaatta

SEQ ID NO: 11979 - RNA, 21 nt, synthetic construct
  source 1..21: mol_type = other RNA
catggacattaattcaacatc

SEQ ID NO: 11980 - RNA, 21 nt, synthetic construct
  source 1..21: mol_type = other RNA
catggactacctgaatataat

SEQ ID NO: 11981 - RNA, 21 nt, synthetic construct
  source 1..21: mol_type = other RNA
cattaattcaacatcgaatag

SEQ ID NO: 11982 - RNA, 21 nt, synthetic construct
  source 1..21: mol_type = other RNA
cattatattcaggtagtccat

SEQ ID NO: 11983 - RNA, 21 nt, synthetic construct
  source 1..21: mol_type = other RNA
cattcattatattcaggtagt

SEQ ID NO: 11984 - RNA, 21 nt, synthetic construct
  source 1..21: mol_type = other RNA
cattgaagttttgtgatccat

SEQ ID NO: 11985 - RNA, 21 nt, synthetic construct
  source 1..21: mol_type = other RNA
ccaaaaccatatttgtagttc

SEQ ID NO: 11986 - RNA, 21 nt, synthetic construct
  source 1..21: mol_type = other RNA
ccacgtttcattgaagttttg

SEQ ID NO: 11987 - RNA, 21 nt, synthetic construct
  source 1..21: mol_type = other RNA
ccatatttgtagttctcccac

SEQ ID NO: 11988 - RNA, 21 nt, synthetic construct
  source 1..21: mol_type = other RNA
ccatcaagcctcccaaaacca

SEQ ID NO: 11989 - RNA, 21 nt, synthetic construct
  source 1..21: mol_type = other RNA
ccatctattcgatgttgaatt

SEQ ID NO: 11990 - RNA, 21 nt, synthetic construct
  source 1..21: mol_type = other RNA
ccatggacattaattcaacat

SEQ ID NO: 11991 - RNA, 21 nt, synthetic construct
  source 1..21: mol_type = other RNA
ccatggactacctgaatataa

SEQ ID NO: 11992 - RNA, 21 nt, synthetic construct
  source 1..21: mol_type = other RNA
cccaaaaccatatttgtagtt

SEQ ID NO: 11993 - RNA, 21 nt, synthetic construct
  source 1..21: mol_type = other RNA
cccacgtttcattgaagtttt

SEQ ID NO: 11994 - RNA, 21 nt, synthetic construct
  source 1..21: mol_type = other RNA
ccccttaccatcaagcctccc

SEQ ID NO: 11995 - RNA, 21 nt, synthetic construct
  source 1..21: mol_type = other RNA
cccttaccatcaagcctccca

SEQ ID NO: 11996 - RNA, 21 nt, synthetic construct
  source 1..21: mol_type = other RNA
cctcccaaaaccatatttgta

SEQ ID NO: 11997 - RNA, 21 nt, synthetic construct
  source 1..21: mol_type = other RNA
cctgaatataatgaatgaaat

SEQ ID NO: 11998 - RNA, 21 nt, synthetic construct
  source 1..21: mol_type = other RNA
ccttaccatcaagcctcccaa

SEQ ID NO: 11999 - RNA, 21 nt, synthetic construct
  source 1..21: mol_type = other RNA
cgaatagatggatcacaaaac

SEQ ID NO: 12000 - RNA, 21 nt, synthetic construct
  source 1..21: mol_type = other RNA
cgatgttgaattaatgtccat

SEQ ID NO: 12001 - RNA, 21 nt, synthetic construct
  source 1..21: mol_type = other RNA
cgtgggagaactacaaatatg

SEQ ID NO: 12002 - RNA, 21 nt, synthetic construct
  source 1..21: mol_type = other RNA
cgtttcattgaagttttgtga

SEQ ID NO: 12003 - RNA, 21 nt, synthetic construct
  source 1..21: mol_type = other RNA
ctacaaatatggttttgggag

SEQ ID NO: 12004 - RNA, 21 nt, synthetic construct
  source 1..21: mol_type = other RNA
ctacctgaatataatgaatga

SEQ ID NO: 12005 - RNA, 21 nt, synthetic construct
  source 1..21: mol_type = other RNA
ctattcgatgttgaattaatg

SEQ ID NO: 12006 - RNA, 21 nt, synthetic construct
  source 1..21: mol_type = other RNA
ctcccaaaaccatatttgtag

SEQ ID NO: 12007 - RNA, 21 nt, synthetic construct
  source 1..21: mol_type = other RNA
ctcccacgtttcattgaagtt

SEQ ID NO: 12008 - RNA, 21 nt, synthetic construct
  source 1..21: mol_type = other RNA
ctgaatataatgaatgaaatc

SEQ ID NO: 12009 - RNA, 21 nt, synthetic construct
  source 1..21: mol_type = other RNA
cttaccatcaagcctcccaaa

SEQ ID NO: 12010 - RNA, 21 nt, synthetic construct
  source 1..21: mol_type = other RNA
cttcaatgaaacgtgggagaa

SEQ ID NO: 12011 - RNA, 21 nt, synthetic construct
  source 1..21: mol_type = other RNA
cttgatggtaaggggactaca

SEQ ID NO: 12012 - RNA, 21 nt, synthetic construct
  source 1..21: mol_type = other RNA
gaaacgtgggagaactacaaa

SEQ ID NO: 12013 - RNA, 21 nt, synthetic construct
  source 1..21: mol_type = other RNA
gaactacaaatatggttttgg

SEQ ID NO: 12014 - RNA, 21 nt, synthetic construct
  source 1..21: mol_type = other RNA
gaagttttgtgatccatctat

SEQ ID NO: 12015 - RNA, 21 nt, synthetic construct
  source 1..21: mol_type = other RNA
gaatagatggatcacaaaact

SEQ ID NO: 12016 - RNA, 21 nt, synthetic construct
  source 1..21: mol_type = other RNA
gaatgaatgattgaatgtagt

SEQ ID NO: 12017 - RNA, 21 nt, synthetic construct
  source 1..21: mol_type = other RNA
gaatgattgaatgtagtcccc

SEQ ID NO: 12018 - RNA, 21 nt, synthetic construct
  source 1..21: mol_type = other RNA
gaatgtagtccccttaccatc

SEQ ID NO: 12019 - RNA, 21 nt, synthetic construct
  source 1..21: mol_type = other RNA
gaattaatgtccatggactac

SEQ ID NO: 12020 - RNA, 21 nt, synthetic construct
  source 1..21: mol_type = other RNA
gacattaattcaacatcgaat

SEQ ID NO: 12021 - RNA, 21 nt, synthetic construct
  source 1..21: mol_type = other RNA
gactacctgaatataatgaat

SEQ ID NO: 12022 - RNA, 21 nt, synthetic construct
  source 1..21: mol_type = other RNA
gagaactacaaatatggtttt

SEQ ID NO: 12023 - RNA, 21 nt, synthetic construct
  source 1..21: mol_type = other RNA
gaggcttgatggtaaggggac

SEQ ID NO: 12024 - RNA, 21 nt, synthetic construct
  source 1..21: mol_type = other RNA
gatcacaaaacttcaatgaaa

SEQ ID NO: 12025 - RNA, 21 nt, synthetic construct
  source 1..21: mol_type = other RNA
gatccatctattcgatgttga

SEQ ID NO: 12026 - RNA, 21 nt, synthetic construct
  source 1..21: mol_type = other RNA
gatggatcacaaaacttcaat

SEQ ID NO: 12027 - RNA, 21 nt, synthetic construct
  source 1..21: mol_type = other RNA
gatggtaaggggactacattc

SEQ ID NO: 12028 - RNA, 21 nt, synthetic construct
  source 1..21: mol_type = other RNA
gatgttgaattaatgtccatg

SEQ ID NO: 12029 - RNA, 21 nt, synthetic construct
  source 1..21: mol_type = other RNA
gattgaatgtagtccccttac

SEQ ID NO: 12030 - RNA, 21 nt, synthetic construct
  source 1..21: mol_type = other RNA
gatttcattcattatattcag

SEQ ID NO: 12031 - RNA, 21 nt, synthetic construct
  source 1..21: mol_type = other RNA
gcctcccaaaaccatatttgt

SEQ ID NO: 12032 - RNA, 21 nt, synthetic construct
  source 1..21: mol_type = other RNA
gcttgatggtaaggggactac

SEQ ID NO: 12033 - RNA, 21 nt, synthetic construct
  source 1..21: mol_type = other RNA
ggacattaattcaacatcgaa

SEQ ID NO: 12034 - RNA, 21 nt, synthetic construct
  source 1..21: mol_type = other RNA
ggactacctgaatataatgaa

SEQ ID NO: 12035 - RNA, 21 nt, synthetic construct
  source 1..21: mol_type = other RNA
ggagaactacaaatatggttt

SEQ ID NO: 12036 - RNA, 21 nt, synthetic construct
  source 1..21: mol_type = other RNA
ggaggcttgatggtaagggga

SEQ ID NO: 12037 - RNA, 21 nt, synthetic construct
  source 1..21: mol_type = other RNA
ggatcacaaaacttcaatgaa

SEQ ID NO: 12038 - RNA, 21 nt, synthetic construct
  source 1..21: mol_type = other RNA
ggcttgatggtaaggggacta

SEQ ID NO: 12039 - RNA, 21 nt, synthetic construct
  source 1..21: mol_type = other RNA
gggagaactacaaatatggtt

SEQ ID NO: 12040 - RNA, 21 nt, synthetic construct
  source 1..21: mol_type = other RNA
gggaggcttgatggtaagggg

SEQ ID NO: 12041 - RNA, 21 nt, synthetic construct
  source 1..21: mol_type = other RNA
ggtaaggggactacattcaat

SEQ ID NO: 12042 - RNA, 21 nt, synthetic construct
  source 1..21: mol_type = other RNA
ggtagtccatggacattaatt

SEQ ID NO: 12043 - RNA, 21 nt, synthetic construct
  source 1..21: mol_type = other RNA
ggttttgggaggcttgatggt

SEQ ID NO: 12044 - RNA, 21 nt, synthetic construct
  source 1..21: mol_type = other RNA
gtaaggggactacattcaatc

SEQ ID NO: 12045 - RNA, 21 nt, synthetic construct
  source 1..21: mol_type = other RNA
gtagtccatggacattaattc

SEQ ID NO: 12046 - RNA, 21 nt, synthetic construct
  source 1..21: mol_type = other RNA
gtagtccccttaccatcaagc

SEQ ID NO: 12047 - RNA, 21 nt, synthetic construct
  source 1..21: mol_type = other RNA
gtagttctcccacgtttcatt

SEQ ID NO: 12048 - RNA, 21 nt, synthetic construct
  source 1..21: mol_type = other RNA
gtccatggacattaattcaac

SEQ ID NO: 12049 - RNA, 21 nt, synthetic construct
  source 1..21: mol_type = other RNA
gtccatggactacctgaatat

SEQ ID NO: 12050 - RNA, 21 nt, synthetic construct
  source 1..21: mol_type = other RNA
gtccccttaccatcaagcctc

SEQ ID NO: 12051 - RNA, 21 nt, synthetic construct
  source 1..21: mol_type = other RNA
gtgatccatctattcgatgtt

SEQ ID NO: 12052 - RNA, 21 nt, synthetic construct
  source 1..21: mol_type = other RNA
gtgggagaactacaaatatgg

SEQ ID NO: 12053 - RNA, 21 nt, synthetic construct
  source 1..21: mol_type = other RNA
gttctcccacgtttcattgaa

SEQ ID NO: 12054 - RNA, 21 nt, synthetic construct
  source 1..21: mol_type = other RNA
gttgaattaatgtccatggac

SEQ ID NO: 12055 - RNA, 21 nt, synthetic construct
  source 1..21: mol_type = other RNA
gtttcattgaagttttgtgat

SEQ ID NO: 12056 - RNA, 21 nt, synthetic construct
  source 1..21: mol_type = other RNA
gttttgggaggcttgatggta

SEQ ID NO: 12057 - RNA, 21 nt, synthetic construct
  source 1..21: mol_type = other RNA
gttttgtgatccatctattcg

SEQ ID NO: 12058 - RNA, 21 nt, synthetic construct
  source 1..21: mol_type = other RNA
taaggggactacattcaatca

SEQ ID NO: 12059 - RNA, 21 nt, synthetic construct
  source 1..21: mol_type = other RNA
taatgtccatggactacctga

SEQ ID NO: 12060 - RNA, 21 nt, synthetic construct
  source 1..21: mol_type = other RNA
taattcaacatcgaatagatg

SEQ ID NO: 12061 - RNA, 21 nt, synthetic construct
  source 1..21: mol_type = other RNA
tacaaatatggttttgggagg

SEQ ID NO: 12062 - RNA, 21 nt, synthetic construct
  source 1..21: mol_type = other RNA
taccatcaagcctcccaaaac

SEQ ID NO: 12063 - RNA, 21 nt, synthetic construct
  source 1..21: mol_type = other RNA
tacctgaatataatgaatgaa

SEQ ID NO: 12064 - RNA, 21 nt, synthetic construct
  source 1..21: mol_type = other RNA
tagatggatcacaaaacttca

SEQ ID NO: 12065 - RNA, 21 nt, synthetic construct
  source 1..21: mol_type = other RNA
tagtccatggacattaattca

SEQ ID NO: 12066 - RNA, 21 nt, synthetic construct
  source 1..21: mol_type = other RNA
tagtccccttaccatcaagcc

SEQ ID NO: 12067 - RNA, 21 nt, synthetic construct
  source 1..21: mol_type = other RNA
tagttctcccacgtttcattg

SEQ ID NO: 12068 - RNA, 21 nt, synthetic construct
  source 1..21: mol_type = other RNA
tatattcaggtagtccatgga

SEQ ID NO: 12069 - RNA, 21 nt, synthetic construct
  source 1..21: mol_type = other RNA
tatggttttgggaggcttgat

SEQ ID NO: 12070 - RNA, 21 nt, synthetic construct
  source 1..21: mol_type = other RNA
tattcaggtagtccatggaca

SEQ ID NO: 12071 - RNA, 21 nt, synthetic construct
  source 1..21: mol_type = other RNA
tattcgatgttgaattaatgt

SEQ ID NO: 12072 - RNA, 21 nt, synthetic construct
  source 1..21: mol_type = other RNA
tatttgtagttctcccacgtt

SEQ ID NO: 12073 - RNA, 21 nt, synthetic construct
  source 1..21: mol_type = other RNA
tcaacatcgaatagatggatc

SEQ ID NO: 12074 - RNA, 21 nt, synthetic construct
  source 1..21: mol_type = other RNA
tcaagcctcccaaaaccatat

SEQ ID NO: 12075 - RNA, 21 nt, synthetic construct
  source 1..21: mol_type = other RNA
tcaatgaaacgtgggagaact

SEQ ID NO: 12076 - RNA, 21 nt, synthetic construct
  source 1..21: mol_type = other RNA
tcacaaaacttcaatgaaacg

SEQ ID NO: 12077 - RNA, 21 nt, synthetic construct
  source 1..21: mol_type = other RNA
tcaggtagtccatggacatta

SEQ ID NO: 12078 - RNA, 21 nt, synthetic construct
  source 1..21: mol_type = other RNA
tcattatattcaggtagtcca

SEQ ID NO: 12079 - RNA, 21 nt, synthetic construct
  source 1..21: mol_type = other RNA
tcattcattatattcaggtag

SEQ ID NO: 12080 - RNA, 21 nt, synthetic construct
  source 1..21: mol_type = other RNA
tcattgaagttttgtgatcca

SEQ ID NO: 12081 - RNA, 21 nt, synthetic construct
  source 1..21: mol_type = other RNA
tccatctattcgatgttgaat

SEQ ID NO: 12082 - RNA, 21 nt, synthetic construct
  source 1..21: mol_type = other RNA
tccatggacattaattcaaca

SEQ ID NO: 12083 - RNA, 21 nt, synthetic construct
  source 1..21: mol_type = other RNA
tccatggactacctgaatata

SEQ ID NO: 12084 - RNA, 21 nt, synthetic construct
  source 1..21: mol_type = other RNA
tcccaaaaccatatttgtagt

SEQ ID NO: 12085 - RNA, 21 nt, synthetic construct
  source 1..21: mol_type = other RNA
tcccacgtttcattgaagttt

SEQ ID NO: 12086 - RNA, 21 nt, synthetic construct
  source 1..21: mol_type = other RNA
tccccttaccatcaagcctcc

SEQ ID NO: 12087 - RNA, 21 nt, synthetic construct
  source 1..21: mol_type = other RNA
tcgaatagatggatcacaaaa

SEQ ID NO: 12088 - RNA, 21 nt, synthetic construct
  source 1..21: mol_type = other RNA
tcgatgttgaattaatgtcca

SEQ ID NO: 12089 - RNA, 21 nt, synthetic construct
  source 1..21: mol_type = other RNA
tctattcgatgttgaattaat

SEQ ID NO: 12090 - RNA, 21 nt, synthetic construct
  source 1..21: mol_type = other RNA
tctcccacgtttcattgaagt

SEQ ID NO: 12091 - RNA, 21 nt, synthetic construct
  source 1..21: mol_type = other RNA
tgaaacgtgggagaactacaa

SEQ ID NO: 12092 - RNA, 21 nt, synthetic construct
  source 1..21: mol_type = other RNA
tgaagttttgtgatccatcta

SEQ ID NO: 12093 - RNA, 21 nt, synthetic construct
  source 1..21: mol_type = other RNA
tgaatgaatgattgaatgtag

SEQ ID NO: 12094 - RNA, 21 nt, synthetic construct
  source 1..21: mol_type = other RNA
tgaatgattgaatgtagtccc

SEQ ID NO: 12095 - RNA, 21 nt, synthetic construct
  source 1..21: mol_type = other RNA
tgaatgtagtccccttaccat

SEQ ID NO: 12096 - RNA, 21 nt, synthetic construct
  source 1..21: mol_type = other RNA
tgaattaatgtccatggacta

SEQ ID NO: 12097 - RNA, 21 nt, synthetic construct
  source 1..21: mol_type = other RNA
tgatccatctattcgatgttg

SEQ ID NO: 12098 - RNA, 21 nt, synthetic construct
  source 1..21: mol_type = other RNA
tgatggtaaggggactacatt

SEQ ID NO: 12099 - RNA, 21 nt, synthetic construct
  source 1..21: mol_type = other RNA
tgattgaatgtagtcccctta

SEQ ID NO: 12100 - RNA, 21 nt, synthetic construct
  source 1..21: mol_type = other RNA
tggacattaattcaacatcga

SEQ ID NO: 12101 - RNA, 21 nt, synthetic construct
  source 1..21: mol_type = other RNA
tggactacctgaatataatga

SEQ ID NO: 12102 - RNA, 21 nt, synthetic construct
  source 1..21: mol_type = other RNA
tggatcacaaaacttcaatga

SEQ ID NO: 12103 - RNA, 21 nt, synthetic construct
  source 1..21: mol_type = other RNA
tgggagaactacaaatatggt

SEQ ID NO: 12104 - RNA, 21 nt, synthetic construct
  source 1..21: mol_type = other RNA
tgggaggcttgatggtaaggg

SEQ ID NO: 12105 - RNA, 21 nt, synthetic construct
  source 1..21: mol_type = other RNA
tggtaaggggactacattcaa

SEQ ID NO: 12106 - RNA, 21 nt, synthetic construct
  source 1..21: mol_type = other RNA
tggttttgggaggcttgatgg

SEQ ID NO: 12107 - RNA, 21 nt, synthetic construct
  source 1..21: mol_type = other RNA
tgtagtccccttaccatcaag

SEQ ID NO: 12108 - RNA, 21 nt, synthetic construct
  source 1..21: mol_type = other RNA
tgtagttctcccacgtttcat

SEQ ID NO: 12109 - RNA, 21 nt, synthetic construct
  source 1..21: mol_type = other RNA
tgtccatggactacctgaata

SEQ ID NO: 12110 - RNA, 21 nt, synthetic construct
  source 1..21: mol_type = other RNA
tgtgatccatctattcgatgt

SEQ ID NO: 12111 - RNA, 21 nt, synthetic construct
  source 1..21: mol_type = other RNA
tgttgaattaatgtccatgga

SEQ ID NO: 12112 - RNA, 21 nt, synthetic construct
  source 1..21: mol_type = other RNA
ttaatgtccatggactacctg

SEQ ID NO: 12113 - RNA, 21 nt, synthetic construct
  source 1..21: mol_type = other RNA
ttaattcaacatcgaatagat

SEQ ID NO: 12114 - RNA, 21 nt, synthetic construct
  source 1..21: mol_type = other RNA
ttaccatcaagcctcccaaaa

SEQ ID NO: 12115 - RNA, 21 nt, synthetic construct
  source 1..21: mol_type = other RNA
ttatattcaggtagtccatgg

SEQ ID NO: 12116 - RNA, 21 nt, synthetic construct
  source 1..21: mol_type = other RNA
ttcaacatcgaatagatggat

SEQ ID NO: 12117 - RNA, 21 nt, synthetic construct
  source 1..21: mol_type = other RNA
ttcaatgaaacgtgggagaac

SEQ ID NO: 12118 - RNA, 21 nt, synthetic construct
  source 1..21: mol_type = other RNA
ttcaggtagtccatggacatt

SEQ ID NO: 12119 - RNA, 21 nt, synthetic construct
  source 1..21: mol_type = other RNA
ttcattatattcaggtagtcc

SEQ ID NO: 12120 - RNA, 21 nt, synthetic construct
  source 1..21: mol_type = other RNA
ttcattcattatattcaggta

SEQ ID NO: 12121 - RNA, 21 nt, synthetic construct
  source 1..21: mol_type = other RNA
ttcattgaagttttgtgatcc

SEQ ID NO: 12122 - RNA, 21 nt, synthetic construct
  source 1..21: mol_type = other RNA
ttcgatgttgaattaatgtcc

SEQ ID NO: 12123 - RNA, 21 nt, synthetic construct
  source 1..21: mol_type = other RNA
ttctcccacgtttcattgaag

SEQ ID NO: 12124 - RNA, 21 nt, synthetic construct
  source 1..21: mol_type = other RNA
ttgaagttttgtgatccatct

SEQ ID NO: 12125 - RNA, 21 nt, synthetic construct
  source 1..21: mol_type = other RNA
ttgaatgtagtccccttacca

SEQ ID NO: 12126 - RNA, 21 nt, synthetic construct
  source 1..21: mol_type = other RNA
ttgaattaatgtccatggact

SEQ ID NO: 12127 - RNA, 21 nt, synthetic construct
  source 1..21: mol_type = other RNA
ttgatggtaaggggactacat

SEQ ID NO: 12128 - RNA, 21 nt, synthetic construct
  source 1..21: mol_type = other RNA
ttgggaggcttgatggtaagg

SEQ ID NO: 12129 - RNA, 21 nt, synthetic construct
  source 1..21: mol_type = other RNA
ttgtagttctcccacgtttca

SEQ ID NO: 12130 - RNA, 21 nt, synthetic construct
  source 1..21: mol_type = other RNA
ttgtgatccatctattcgatg

SEQ ID NO: 12131 - RNA, 21 nt, synthetic construct
  source 1..21: mol_type = other RNA
tttcattcattatattcaggt

SEQ ID NO: 12132 - RNA, 21 nt, synthetic construct
  source 1..21: mol_type = other RNA
tttcattgaagttttgtgatc

SEQ ID NO: 12133 - RNA, 21 nt, synthetic construct
  source 1..21: mol_type = other RNA
tttgggaggcttgatggtaag

SEQ ID NO: 12134 - RNA, 21 nt, synthetic construct
  source 1..21: mol_type = other RNA
tttgtagttctcccacgtttc

SEQ ID NO: 12135 - RNA, 21 nt, synthetic construct
  source 1..21: mol_type = other RNA
tttgtgatccatctattcgat

SEQ ID NO: 12136 - RNA, 21 nt, synthetic construct
  source 1..21: mol_type = other RNA
ttttgggaggcttgatggtaa

SEQ ID NO: 12137 - RNA, 21 nt, synthetic construct
  source 1..21: mol_type = other RNA
ttttgtgatccatctattcga

SEQ ID NO: 12138 - RNA, 22 nt, synthetic construct
  source 1..22: mol_type = other RNA
aaaaccatatttgtagttctcc

SEQ ID NO: 12139 - RNA, 22 nt, synthetic construct
  source 1..22: mol_type = other RNA
aaaacttcaatgaaacgtggga

SEQ ID NO: 12140 - RNA, 22 nt, synthetic construct
  source 1..22: mol_type = other RNA
aaaccatatttgtagttctccc

SEQ ID NO: 12141 - RNA, 22 nt, synthetic construct
  source 1..22: mol_type = other RNA
aaacgtgggagaactacaaata

SEQ ID NO: 12142 - RNA, 22 nt, synthetic construct
  source 1..22: mol_type = other RNA
aaacttcaatgaaacgtgggag

SEQ ID NO: 12143 - RNA, 22 nt, synthetic construct
  source 1..22: mol_type = other RNA
aaatatggttttgggaggcttg

SEQ ID NO: 12144 - RNA, 22 nt, synthetic construct
  source 1..22: mol_type = other RNA
aacatcgaatagatggatcaca

SEQ ID NO: 12145 - RNA, 22 nt, synthetic construct
  source 1..22: mol_type = other RNA
aaccatatttgtagttctccca

SEQ ID NO: 12146 - RNA, 22 nt, synthetic construct
  source 1..22: mol_type = other RNA
aacgtgggagaactacaaatat

SEQ ID NO: 12147 - RNA, 22 nt, synthetic construct
  source 1..22: mol_type = other RNA
aactacaaatatggttttggga

SEQ ID NO: 12148 - RNA, 22 nt, synthetic construct
  source 1..22: mol_type = other RNA
aacttcaatgaaacgtgggaga

SEQ ID NO: 12149 - RNA, 22 nt, synthetic construct
  source 1..22: mol_type = other RNA
aagcctcccaaaaccatatttg

SEQ ID NO: 12150 - RNA, 22 nt, synthetic construct
  source 1..22: mol_type = other RNA
aagttttgtgatccatctattc

SEQ ID NO: 12151 - RNA, 22 nt, synthetic construct
  source 1..22: mol_type = other RNA
aatagatggatcacaaaacttc

SEQ ID NO: 12152 - RNA, 22 nt, synthetic construct
  source 1..22: mol_type = other RNA
aatatggttttgggaggcttga

SEQ ID NO: 12153 - RNA, 22 nt, synthetic construct
  source 1..22: mol_type = other RNA
aatgaaacgtgggagaactaca

SEQ ID NO: 12154 - RNA, 22 nt, synthetic construct
  source 1..22: mol_type = other RNA
aatgaatgattgaatgtagtcc

SEQ ID NO: 12155 - RNA, 22 nt, synthetic construct
  source 1..22: mol_type = other RNA
aatgattgaatgtagtcccctt

SEQ ID NO: 12156 - RNA, 22 nt, synthetic construct
  source 1..22: mol_type = other RNA
aatgtagtccccttaccatcaa

SEQ ID NO: 12157 - RNA, 22 nt, synthetic construct
  source 1..22: mol_type = other RNA
aatgtccatggactacctgaat

SEQ ID NO: 12158 - RNA, 22 nt, synthetic construct
  source 1..22: mol_type = other RNA
aattaatgtccatggactacct

SEQ ID NO: 12159 - RNA, 22 nt, synthetic construct
  source 1..22: mol_type = other RNA
aattcaacatcgaatagatgga

SEQ ID NO: 12160 - RNA, 22 nt, synthetic construct
  source 1..22: mol_type = other RNA
acaaaacttcaatgaaacgtgg

SEQ ID NO: 12161 - RNA, 22 nt, synthetic construct
  source 1..22: mol_type = other RNA
acaaatatggttttgggaggct

SEQ ID NO: 12162 - RNA, 22 nt, synthetic construct
  source 1..22: mol_type = other RNA
acatcgaatagatggatcacaa

SEQ ID NO: 12163 - RNA, 22 nt, synthetic construct
  source 1..22: mol_type = other RNA
acattaattcaacatcgaatag

SEQ ID NO: 12164 - RNA, 22 nt, synthetic construct
  source 1..22: mol_type = other RNA
accatatttgtagttctcccac

SEQ ID NO: 12165 - RNA, 22 nt, synthetic construct
  source 1..22: mol_type = other RNA
accatcaagcctcccaaaacca

SEQ ID NO: 12166 - RNA, 22 nt, synthetic construct
  source 1..22: mol_type = other RNA
acctgaatataatgaatgaaat

SEQ ID NO: 12167 - RNA, 22 nt, synthetic construct
  source 1..22: mol_type = other RNA
acgtgggagaactacaaatatg

SEQ ID NO: 12168 - RNA, 22 nt, synthetic construct
  source 1..22: mol_type = other RNA
acgtttcattgaagttttgtga

SEQ ID NO: 12169 - RNA, 22 nt, synthetic construct
  source 1..22: mol_type = other RNA
actacaaatatggttttgggag

SEQ ID NO: 12170 - RNA, 22 nt, synthetic construct
  source 1..22: mol_type = other RNA
actacctgaatataatgaatga

SEQ ID NO: 12171 - RNA, 22 nt, synthetic construct
  source 1..22: mol_type = other RNA
acttcaatgaaacgtgggagaa

SEQ ID NO: 12172 - RNA, 22 nt, synthetic construct
  source 1..22: mol_type = other RNA
agaactacaaatatggttttgg

SEQ ID NO: 12173 - RNA, 22 nt, synthetic construct
  source 1..22: mol_type = other RNA
agatggatcacaaaacttcaat

SEQ ID NO: 12174 - RNA, 22 nt, synthetic construct
  source 1..22: mol_type = other RNA
agcctcccaaaaccatatttgt

SEQ ID NO: 12175 - RNA, 22 nt, synthetic construct
  source 1..22: mol_type = other RNA
aggcttgatggtaaggggacta

SEQ ID NO: 12176 - RNA, 22 nt, synthetic construct
  source 1..22: mol_type = other RNA
aggtagtccatggacattaatt

SEQ ID NO: 12177 - RNA, 22 nt, synthetic construct
  source 1..22: mol_type = other RNA
agtccatggacattaattcaac

SEQ ID NO: 12178 - RNA, 22 nt, synthetic construct
  source 1..22: mol_type = other RNA
agtccccttaccatcaagcctc

SEQ ID NO: 12179 - RNA, 22 nt, synthetic construct
  source 1..22: mol_type = other RNA
agttctcccacgtttcattgaa

SEQ ID NO: 12180 - RNA, 22 nt, synthetic construct
  source 1..22: mol_type = other RNA
agttttgtgatccatctattcg

SEQ ID NO: 12181 - RNA, 22 nt, synthetic construct
  source 1..22: mol_type = other RNA
atagatggatcacaaaacttca

SEQ ID NO: 12182 - RNA, 22 nt, synthetic construct
  source 1..22: mol_type = other RNA
atatggttttgggaggcttgat

SEQ ID NO: 12183 - RNA, 22 nt, synthetic construct
  source 1..22: mol_type = other RNA
atattcaggtagtccatggaca

SEQ ID NO: 12184 - RNA, 22 nt, synthetic construct
  source 1..22: mol_type = other RNA
atatttgtagttctcccacgtt

SEQ ID NO: 12185 - RNA, 22 nt, synthetic construct
  source 1..22: mol_type = other RNA
atcaagcctcccaaaaccatat

SEQ ID NO: 12186 - RNA, 22 nt, synthetic construct
  source 1..22: mol_type = other RNA
atcacaaaacttcaatgaaacg

SEQ ID NO: 12187 - RNA, 22 nt, synthetic construct
  source 1..22: mol_type = other RNA
atccatctattcgatgttgaat

SEQ ID NO: 12188 - RNA, 22 nt, synthetic construct
  source 1..22: mol_type = other RNA
atcgaatagatggatcacaaaa

SEQ ID NO: 12189 - RNA, 22 nt, synthetic construct
  source 1..22: mol_type = other RNA
atctattcgatgttgaattaat

SEQ ID NO: 12190 - RNA, 22 nt, synthetic construct
  source 1..22: mol_type = other RNA
atgaaacgtgggagaactacaa

SEQ ID NO: 12191 - RNA, 22 nt, synthetic construct
  source 1..22: mol_type = other RNA
atgaatgattgaatgtagtccc

SEQ ID NO: 12192 - RNA, 22 nt, synthetic construct
  source 1..22: mol_type = other RNA
atgattgaatgtagtcccctta

SEQ ID NO: 12193 - RNA, 22 nt, synthetic construct
  source 1..22: mol_type = other RNA
atggacattaattcaacatcga

SEQ ID NO: 12194 - RNA, 22 nt, synthetic construct
  source 1..22: mol_type = other RNA
atggactacctgaatataatga

SEQ ID NO: 12195 - RNA, 22 nt, synthetic construct
  source 1..22: mol_type = other RNA
atggatcacaaaacttcaatga

SEQ ID NO: 12196 - RNA, 22 nt, synthetic construct
  source 1..22: mol_type = other RNA
atggtaaggggactacattcaa

SEQ ID NO: 12197 - RNA, 22 nt, synthetic construct
  source 1..22: mol_type = other RNA
atggttttgggaggcttgatgg

SEQ ID NO: 12198 - RNA, 22 nt, synthetic construct
  source 1..22: mol_type = other RNA
atgtagtccccttaccatcaag

SEQ ID NO: 12199 - RNA, 22 nt, synthetic construct
  source 1..22: mol_type = other RNA
atgtccatggactacctgaata

SEQ ID NO: 12200 - RNA, 22 nt, synthetic construct
  source 1..22: mol_type = other RNA
atgttgaattaatgtccatgga

SEQ ID NO: 12201 - RNA, 22 nt, synthetic construct
  source 1..22: mol_type = other RNA
attaatgtccatggactacctg

SEQ ID NO: 12202 - RNA, 22 nt, synthetic construct
  source 1..22: mol_type = other RNA
attaattcaacatcgaatagat

SEQ ID NO: 12203 - RNA, 22 nt, synthetic construct
  source 1..22: mol_type = other RNA
attatattcaggtagtccatgg

SEQ ID NO: 12204 - RNA, 22 nt, synthetic construct
  source 1..22: mol_type = other RNA
attcaacatcgaatagatggat

SEQ ID NO: 12205 - RNA, 22 nt, synthetic construct
  source 1..22: mol_type = other RNA
attcaggtagtccatggacatt

SEQ ID NO: 12206 - RNA, 22 nt, synthetic construct
  source 1..22: mol_type = other RNA
attcattatattcaggtagtcc

SEQ ID NO: 12207 - RNA, 22 nt, synthetic construct
  source 1..22: mol_type = other RNA
attcgatgttgaattaatgtcc

SEQ ID NO: 12208 - RNA, 22 nt, synthetic construct
  source 1..22: mol_type = other RNA
attgaagttttgtgatccatct

SEQ ID NO: 12209 - RNA, 22 nt, synthetic construct
  source 1..22: mol_type = other RNA
attgaatgtagtccccttacca

SEQ ID NO: 12210 - RNA, 22 nt, synthetic construct
  source 1..22: mol_type = other RNA
atttcattcattatattcaggt

SEQ ID NO: 12211 - RNA, 22 nt, synthetic construct
  source 1..22: mol_type = other RNA
atttgtagttctcccacgtttc

SEQ ID NO: 12212 - RNA, 22 nt, synthetic construct
  source 1..22: mol_type = other RNA
caaaaccatatttgtagttctc

SEQ ID NO: 12213 - RNA, 22 nt, synthetic construct
  source 1..22: mol_type = other RNA
caaaacttcaatgaaacgtggg

SEQ ID NO: 12214 - RNA, 22 nt, synthetic construct
  source 1..22: mol_type = other RNA
caaatatggttttgggaggctt

SEQ ID NO: 12215 - RNA, 22 nt, synthetic construct
  source 1..22: mol_type = other RNA
caacatcgaatagatggatcac

SEQ ID NO: 12216 - RNA, 22 nt, synthetic construct
  source 1..22: mol_type = other RNA
caagcctcccaaaaccatattt

SEQ ID NO: 12217 - RNA, 22 nt, synthetic construct
  source 1..22: mol_type = other RNA
caatgaaacgtgggagaactac

SEQ ID NO: 12218 - RNA, 22 nt, synthetic construct
  source 1..22: mol_type = other RNA
cacaaaacttcaatgaaacgtg

SEQ ID NO: 12219 - RNA, 22 nt, synthetic construct
  source 1..22: mol_type = other RNA
cacgtttcattgaagttttgtg

SEQ ID NO: 12220 - RNA, 22 nt, synthetic construct
  source 1..22: mol_type = other RNA
caggtagtccatggacattaat

SEQ ID NO: 12221 - RNA, 22 nt, synthetic construct
  source 1..22: mol_type = other RNA
catatttgtagttctcccacgt

SEQ ID NO: 12222 - RNA, 22 nt, synthetic construct
  source 1..22: mol_type = other RNA
catcaagcctcccaaaaccata

SEQ ID NO: 12223 - RNA, 22 nt, synthetic construct
  source 1..22: mol_type = other RNA
catcgaatagatggatcacaaa

SEQ ID NO: 12224 - RNA, 22 nt, synthetic construct
  source 1..22: mol_type = other RNA
catctattcgatgttgaattaa

SEQ ID NO: 12225 - RNA, 22 nt, synthetic construct
  source 1..22: mol_type = other RNA
catgatttcattcattatattc

SEQ ID NO: 12226 - RNA, 22 nt, synthetic construct
  source 1..22: mol_type = other RNA
catggacattaattcaacatcg

SEQ ID NO: 12227 - RNA, 22 nt, synthetic construct
  source 1..22: mol_type = other RNA
catggactacctgaatataatg

SEQ ID NO: 12228 - RNA, 22 nt, synthetic construct
  source 1..22: mol_type = other RNA
cattaattcaacatcgaataga

SEQ ID NO: 12229 - RNA, 22 nt, synthetic construct
  source 1..22: mol_type = other RNA
cattatattcaggtagtccatg

SEQ ID NO: 12230 - RNA, 22 nt, synthetic construct
  source 1..22: mol_type = other RNA
cattcattatattcaggtagtc

SEQ ID NO: 12231 - RNA, 22 nt, synthetic construct
  source 1..22: mol_type = other RNA
cattgaagttttgtgatccatc

SEQ ID NO: 12232 - RNA, 22 nt, synthetic construct
  source 1..22: mol_type = other RNA
ccaaaaccatatttgtagttct

SEQ ID NO: 12233 - RNA, 22 nt, synthetic construct
  source 1..22: mol_type = other RNA
ccacgtttcattgaagttttgt

SEQ ID NO: 12234 - RNA, 22 nt, synthetic construct
  source 1..22: mol_type = other RNA
ccatatttgtagttctcccacg

SEQ ID NO: 12235 - RNA, 22 nt, synthetic construct
  source 1..22: mol_type = other RNA
ccatcaagcctcccaaaaccat

SEQ ID NO: 12236 - RNA, 22 nt, synthetic construct
  source 1..22: mol_type = other RNA
ccatctattcgatgttgaatta

SEQ ID NO: 12237 - RNA, 22 nt, synthetic construct
  source 1..22: mol_type = other RNA
ccatggacattaattcaacatc

SEQ ID NO: 12238 - RNA, 22 nt, synthetic construct
  source 1..22: mol_type = other RNA
ccatggactacctgaatataat

SEQ ID NO: 12239 - RNA, 22 nt, synthetic construct
  source 1..22: mol_type = other RNA
cccaaaaccatatttgtagttc

SEQ ID NO: 12240 - RNA, 22 nt, synthetic construct
  source 1..22: mol_type = other RNA
cccacgtttcattgaagttttg

SEQ ID NO: 12241 - RNA, 22 nt, synthetic construct
  source 1..22: mol_type = other RNA
ccccttaccatcaagcctccca

SEQ ID NO: 12242 - RNA, 22 nt, synthetic construct
  source 1..22: mol_type = other RNA
cccttaccatcaagcctcccaa

SEQ ID NO: 12243 - RNA, 22 nt, synthetic construct
  source 1..22: mol_type = other RNA
cctcccaaaaccatatttgtag

SEQ ID NO: 12244 - RNA, 22 nt, synthetic construct
  source 1..22: mol_type = other RNA
cctgaatataatgaatgaaatc

SEQ ID NO: 12245 - RNA, 22 nt, synthetic construct
  source 1..22: mol_type = other RNA
ccttaccatcaagcctcccaaa

SEQ ID NO: 12246 - RNA, 22 nt, synthetic construct
  source 1..22: mol_type = other RNA
cgaatagatggatcacaaaact

SEQ ID NO: 12247 - RNA, 22 nt, synthetic construct
  source 1..22: mol_type = other RNA
cgatgttgaattaatgtccatg

SEQ ID NO: 12248 - RNA, 22 nt, synthetic construct
  source 1..22: mol_type = other RNA
cgtgggagaactacaaatatgg

SEQ ID NO: 12249 - RNA, 22 nt, synthetic construct
  source 1..22: mol_type = other RNA
cgtttcattgaagttttgtgat

SEQ ID NO: 12250 - RNA, 22 nt, synthetic construct
  source 1..22: mol_type = other RNA
ctacaaatatggttttgggagg

SEQ ID NO: 12251 - RNA, 22 nt, synthetic construct
  source 1..22: mol_type = other RNA
ctacctgaatataatgaatgaa

SEQ ID NO: 12252 - RNA, 22 nt, synthetic construct
  source 1..22: mol_type = other RNA
ctattcgatgttgaattaatgt

SEQ ID NO: 12253 - RNA, 22 nt, synthetic construct
  source 1..22: mol_type = other RNA
ctcccaaaaccatatttgtagt

SEQ ID NO: 12254 - RNA, 22 nt, synthetic construct
  source 1..22: mol_type = other RNA
ctcccacgtttcattgaagttt

SEQ ID NO: 12255 - RNA, 22 nt, synthetic construct
  source 1..22: mol_type = other RNA
ctgaatataatgaatgaaatca

SEQ ID NO: 12256 - RNA, 22 nt, synthetic construct
  source 1..22: mol_type = other RNA
cttaccatcaagcctcccaaaa

SEQ ID NO: 12257 - RNA, 22 nt, synthetic construct
  source 1..22: mol_type = other RNA
cttcaatgaaacgtgggagaac

SEQ ID NO: 12258 - RNA, 22 nt, synthetic construct
  source 1..22: mol_type = other RNA
cttgatggtaaggggactacat

SEQ ID NO: 12259 - RNA, 22 nt, synthetic construct
  source 1..22: mol_type = other RNA
gaaacgtgggagaactacaaat

SEQ ID NO: 12260 - RNA, 22 nt, synthetic construct
  source 1..22: mol_type = other RNA
gaactacaaatatggttttggg

SEQ ID NO: 12261 - RNA, 22 nt, synthetic construct
  source 1..22: mol_type = other RNA
gaagttttgtgatccatctatt

SEQ ID NO: 12262 - RNA, 22 nt, synthetic construct
  source 1..22: mol_type = other RNA
gaatagatggatcacaaaactt

SEQ ID NO: 12263 - RNA, 22 nt, synthetic construct
  source 1..22: mol_type = other RNA
gaatgaatgattgaatgtagtc

SEQ ID NO: 12264 - RNA, 22 nt, synthetic construct
  source 1..22: mol_type = other RNA
gaatgattgaatgtagtcccct

SEQ ID NO: 12265 - RNA, 22 nt, synthetic construct
  source 1..22: mol_type = other RNA
gaatgtagtccccttaccatca

SEQ ID NO: 12266 - RNA, 22 nt, synthetic construct
  source 1..22: mol_type = other RNA
gaattaatgtccatggactacc

SEQ ID NO: 12267 - RNA, 22 nt, synthetic construct
  source 1..22: mol_type = other RNA
gacattaattcaacatcgaata

SEQ ID NO: 12268 - RNA, 22 nt, synthetic construct
  source 1..22: mol_type = other RNA
gactacctgaatataatgaatg

SEQ ID NO: 12269 - RNA, 22 nt, synthetic construct
  source 1..22: mol_type = other RNA
gagaactacaaatatggttttg

SEQ ID NO: 12270 - RNA, 22 nt, synthetic construct
  source 1..22: mol_type = other RNA
gaggcttgatggtaaggggact

SEQ ID NO: 12271 - RNA, 22 nt, synthetic construct
  source 1..22: mol_type = other RNA
gatcacaaaacttcaatgaaac

SEQ ID NO: 12272 - RNA, 22 nt, synthetic construct
  source 1..22: mol_type = other RNA
gatccatctattcgatgttgaa

SEQ ID NO: 12273 - RNA, 22 nt, synthetic construct
  source 1..22: mol_type = other RNA
gatggatcacaaaacttcaatg

SEQ ID NO: 12274 - RNA, 22 nt, synthetic construct
  source 1..22: mol_type = other RNA
gatggtaaggggactacattca

SEQ ID NO: 12275 - RNA, 22 nt, synthetic construct
  source 1..22: mol_type = other RNA
gatgttgaattaatgtccatgg

SEQ ID NO: 12276 - RNA, 22 nt, synthetic construct
  source 1..22: mol_type = other RNA
gattgaatgtagtccccttacc

SEQ ID NO: 12277 - RNA, 22 nt, synthetic construct
  source 1..22: mol_type = other RNA
gatttcattcattatattcagg

SEQ ID NO: 12278 - RNA, 22 nt, synthetic construct
  source 1..22: mol_type = other RNA
gcctcccaaaaccatatttgta

SEQ ID NO: 12279 - RNA, 22 nt, synthetic construct
  source 1..22: mol_type = other RNA
gcttgatggtaaggggactaca

SEQ ID NO: 12280 - RNA, 22 nt, synthetic construct
  source 1..22: mol_type = other RNA
ggacattaattcaacatcgaat

SEQ ID NO: 12281 - RNA, 22 nt, synthetic construct
  source 1..22: mol_type = other RNA
ggactacctgaatataatgaat

SEQ ID NO: 12282 - RNA, 22 nt, synthetic construct
  source 1..22: mol_type = other RNA
ggagaactacaaatatggtttt

SEQ ID NO: 12283 - RNA, 22 nt, synthetic construct
  source 1..22: mol_type = other RNA
ggaggcttgatggtaaggggac

SEQ ID NO: 12284 - RNA, 22 nt, synthetic construct
  source 1..22: mol_type = other RNA
ggatcacaaaacttcaatgaaa

SEQ ID NO: 12285 - RNA, 22 nt, synthetic construct
  source 1..22: mol_type = other RNA
ggcttgatggtaaggggactac

SEQ ID NO: 12286 - RNA, 22 nt, synthetic construct
  source 1..22: mol_type = other RNA
gggagaactacaaatatggttt

SEQ ID NO: 12287 - RNA, 22 nt, synthetic construct
  source 1..22: mol_type = other RNA
gggaggcttgatggtaagggga

SEQ ID NO: 12288 - RNA, 22 nt, synthetic construct
  source 1..22: mol_type = other RNA
ggtaaggggactacattcaatc

SEQ ID NO: 12289 - RNA, 22 nt, synthetic construct
  source 1..22: mol_type = other RNA
ggtagtccatggacattaattc

SEQ ID NO: 12290 - RNA, 22 nt, synthetic construct
  source 1..22: mol_type = other RNA
ggttttgggaggcttgatggta

SEQ ID NO: 12291 - RNA, 22 nt, synthetic construct
  source 1..22: mol_type = other RNA
gtaaggggactacattcaatca

SEQ ID NO: 12292 - RNA, 22 nt, synthetic construct
  source 1..22: mol_type = other RNA
gtagtccatggacattaattca

SEQ ID NO: 12293 - RNA, 22 nt, synthetic construct
  source 1..22: mol_type = other RNA
gtagtccccttaccatcaagcc

SEQ ID NO: 12294 - RNA, 22 nt, synthetic construct
  source 1..22: mol_type = other RNA
gtagttctcccacgtttcattg

SEQ ID NO: 12295 - RNA, 22 nt, synthetic construct
  source 1..22: mol_type = other RNA
gtccatggacattaattcaaca

SEQ ID NO: 12296 - RNA, 22 nt, synthetic construct
  source 1..22: mol_type = other RNA
gtccatggactacctgaatata

SEQ ID NO: 12297 - RNA, 22 nt, synthetic construct
  source 1..22: mol_type = other RNA
gtccccttaccatcaagcctcc

SEQ ID NO: 12298 - RNA, 22 nt, synthetic construct
  source 1..22: mol_type = other RNA
gtgatccatctattcgatgttg

SEQ ID NO: 12299 - RNA, 22 nt, synthetic construct
  source 1..22: mol_type = other RNA
gtgggagaactacaaatatggt

SEQ ID NO: 12300 - RNA, 22 nt, synthetic construct
  source 1..22: mol_type = other RNA
gttctcccacgtttcattgaag

SEQ ID NO: 12301 - RNA, 22 nt, synthetic construct
  source 1..22: mol_type = other RNA
gttgaattaatgtccatggact

SEQ ID NO: 12302 - RNA, 22 nt, synthetic construct
  source 1..22: mol_type = other RNA
gtttcattgaagttttgtgatc

SEQ ID NO: 12303 - RNA, 22 nt, synthetic construct
  source 1..22: mol_type = other RNA
gttttgggaggcttgatggtaa

SEQ ID NO: 12304 - RNA, 22 nt, synthetic construct
  source 1..22: mol_type = other RNA
gttttgtgatccatctattcga

SEQ ID NO: 12305 - RNA, 22 nt, synthetic construct
  source 1..22: mol_type = other RNA
taatgtccatggactacctgaa

SEQ ID NO: 12306 - RNA, 22 nt, synthetic construct
  source 1..22: mol_type = other RNA
taattcaacatcgaatagatgg

SEQ ID NO: 12307 - RNA, 22 nt, synthetic construct
  source 1..22: mol_type = other RNA
tacaaatatggttttgggaggc

SEQ ID NO: 12308 - RNA, 22 nt, synthetic construct
  source 1..22: mol_type = other RNA
taccatcaagcctcccaaaacc

SEQ ID NO: 12309 - RNA, 22 nt, synthetic construct
  source 1..22: mol_type = other RNA
tacctgaatataatgaatgaaa

SEQ ID NO: 12310 - RNA, 22 nt, synthetic construct
  source 1..22: mol_type = other RNA
tagatggatcacaaaacttcaa

SEQ ID NO: 12311 - RNA, 22 nt, synthetic construct
  source 1..22: mol_type = other RNA
tagtccatggacattaattcaa

SEQ ID NO: 12312 - RNA, 22 nt, synthetic construct
  source 1..22: mol_type = other RNA
tagtccccttaccatcaagcct

SEQ ID NO: 12313 - RNA, 22 nt, synthetic construct
  source 1..22: mol_type = other RNA
tagttctcccacgtttcattga

SEQ ID NO: 12314 - RNA, 22 nt, synthetic construct
  source 1..22: mol_type = other RNA
tatattcaggtagtccatggac

SEQ ID NO: 12315 - RNA, 22 nt, synthetic construct
  source 1..22: mol_type = other RNA
tatggttttgggaggcttgatg

SEQ ID NO: 12316 - RNA, 22 nt, synthetic construct
  source 1..22: mol_type = other RNA
tattcaggtagtccatggacat

SEQ ID NO: 12317 - RNA, 22 nt, synthetic construct
  source 1..22: mol_type = other RNA
tattcgatgttgaattaatgtc

SEQ ID NO: 12318 - RNA, 22 nt, synthetic construct
  source 1..22: mol_type = other RNA
tatttgtagttctcccacgttt

SEQ ID NO: 12319 - RNA, 22 nt, synthetic construct
  source 1..22: mol_type = other RNA
tcaacatcgaatagatggatca

SEQ ID NO: 12320 - RNA, 22 nt, synthetic construct
  source 1..22: mol_type = other RNA
tcaagcctcccaaaaccatatt

SEQ ID NO: 12321 - RNA, 22 nt, synthetic construct
  source 1..22: mol_type = other RNA
tcaatgaaacgtgggagaacta

SEQ ID NO: 12322 - RNA, 22 nt, synthetic construct
  source 1..22: mol_type = other RNA
tcacaaaacttcaatgaaacgt

SEQ ID NO: 12323 - RNA, 22 nt, synthetic construct
  source 1..22: mol_type = other RNA
tcaggtagtccatggacattaa

SEQ ID NO: 12324 - RNA, 22 nt, synthetic construct
  source 1..22: mol_type = other RNA
tcattatattcaggtagtccat

SEQ ID NO: 12325 - RNA, 22 nt, synthetic construct
  source 1..22: mol_type = other RNA
tcattcattatattcaggtagt

SEQ ID NO: 12326 - RNA, 22 nt, synthetic construct
  source 1..22: mol_type = other RNA
tcattgaagttttgtgatccat

SEQ ID NO: 12327 - RNA, 22 nt, synthetic construct
  source 1..22: mol_type = other RNA
tccatctattcgatgttgaatt

SEQ ID NO: 12328 - RNA, 22 nt, synthetic construct
  source 1..22: mol_type = other RNA
tccatggacattaattcaacat

SEQ ID NO: 12329 - RNA, 22 nt, synthetic construct
  source 1..22: mol_type = other RNA
tccatggactacctgaatataa

SEQ ID NO: 12330 - RNA, 22 nt, synthetic construct
  source 1..22: mol_type = other RNA
tcccaaaaccatatttgtagtt

SEQ ID NO: 12331 - RNA, 22 nt, synthetic construct
  source 1..22: mol_type = other RNA
tcccacgtttcattgaagtttt

SEQ ID NO: 12332 - RNA, 22 nt, synthetic construct
  source 1..22: mol_type = other RNA
tccccttaccatcaagcctccc

SEQ ID NO: 12333 - RNA, 22 nt, synthetic construct
  source 1..22: mol_type = other RNA
tcgaatagatggatcacaaaac

SEQ ID NO: 12334 - RNA, 22 nt, synthetic construct
  source 1..22: mol_type = other RNA
tcgatgttgaattaatgtccat

SEQ ID NO: 12335 - RNA, 22 nt, synthetic construct
  source 1..22: mol_type = other RNA
tctattcgatgttgaattaatg

SEQ ID NO: 12336 - RNA, 22 nt, synthetic construct
  source 1..22: mol_type = other RNA
tctcccacgtttcattgaagtt

SEQ ID NO: 12337 - RNA, 22 nt, synthetic construct
  source 1..22: mol_type = other RNA
tgaaacgtgggagaactacaaa

SEQ ID NO: 12338 - RNA, 22 nt, synthetic construct
  source 1..22: mol_type = other RNA
tgaagttttgtgatccatctat

SEQ ID NO: 12339 - RNA, 22 nt, synthetic construct
  source 1..22: mol_type = other RNA
tgaatgaatgattgaatgtagt

SEQ ID NO: 12340 - RNA, 22 nt, synthetic construct
  source 1..22: mol_type = other RNA
tgaatgattgaatgtagtcccc

SEQ ID NO: 12341 - RNA, 22 nt, synthetic construct
  source 1..22: mol_type = other RNA
tgaatgtagtccccttaccatc

SEQ ID NO: 12342 - RNA, 22 nt, synthetic construct
  source 1..22: mol_type = other RNA
tgaattaatgtccatggactac

SEQ ID NO: 12343 - RNA, 22 nt, synthetic construct
  source 1..22: mol_type = other RNA
tgatccatctattcgatgttga

SEQ ID NO: 12344 - RNA, 22 nt, synthetic construct
  source 1..22: mol_type = other RNA
tgatggtaaggggactacattc

SEQ ID NO: 12345 - RNA, 22 nt, synthetic construct
  source 1..22: mol_type = other RNA
tgattgaatgtagtccccttac

SEQ ID NO: 12346 - RNA, 22 nt, synthetic construct
  source 1..22: mol_type = other RNA
tgatttcattcattatattcag

SEQ ID NO: 12347 - RNA, 22 nt, synthetic construct
  source 1..22: mol_type = other RNA
tggacattaattcaacatcgaa

SEQ ID NO: 12348 - RNA, 22 nt, synthetic construct
  source 1..22: mol_type = other RNA
tggactacctgaatataatgaa

SEQ ID NO: 12349 - RNA, 22 nt, synthetic construct
  source 1..22: mol_type = other RNA
tggatcacaaaacttcaatgaa

SEQ ID NO: 12350 - RNA, 22 nt, synthetic construct
  source 1..22: mol_type = other RNA
tgggagaactacaaatatggtt

SEQ ID NO: 12351 - RNA, 22 nt, synthetic construct
  source 1..22: mol_type = other RNA
tgggaggcttgatggtaagggg

SEQ ID NO: 12352 - RNA, 22 nt, synthetic construct
  source 1..22: mol_type = other RNA
tggtaaggggactacattcaat

SEQ ID NO: 12353 - RNA, 22 nt, synthetic construct
  source 1..22: mol_type = other RNA
tggttttgggaggcttgatggt

SEQ ID NO: 12354 - RNA, 22 nt, synthetic construct
  source 1..22: mol_type = other RNA
tgtagtccccttaccatcaagc

SEQ ID NO: 12355 - RNA, 22 nt, synthetic construct
  source 1..22: mol_type = other RNA
tgtagttctcccacgtttcatt

SEQ ID NO: 12356 - RNA, 22 nt, synthetic construct
  source 1..22: mol_type = other RNA
tgtccatggactacctgaatat

SEQ ID NO: 12357 - RNA, 22 nt, synthetic construct
  source 1..22: mol_type = other RNA
tgtgatccatctattcgatgtt

SEQ ID NO: 12358 - RNA, 22 nt, synthetic construct
  source 1..22: mol_type = other RNA
tgttgaattaatgtccatggac

SEQ ID NO: 12359 - RNA, 22 nt, synthetic construct
  source 1..22: mol_type = other RNA
ttaatgtccatggactacctga

SEQ ID NO: 12360 - RNA, 22 nt, synthetic construct
  source 1..22: mol_type = other RNA
ttaattcaacatcgaatagatg

SEQ ID NO: 12361 - RNA, 22 nt, synthetic construct
  source 1..22: mol_type = other RNA
ttaccatcaagcctcccaaaac

SEQ ID NO: 12362 - RNA, 22 nt, synthetic construct
  source 1..22: mol_type = other RNA
ttatattcaggtagtccatgga

SEQ ID NO: 12363 - RNA, 22 nt, synthetic construct
  source 1..22: mol_type = other RNA
ttcaacatcgaatagatggatc

SEQ ID NO: 12364 - RNA, 22 nt, synthetic construct
  source 1..22: mol_type = other RNA
ttcaatgaaacgtgggagaact

SEQ ID NO: 12365 - RNA, 22 nt, synthetic construct
  source 1..22: mol_type = other RNA
ttcaggtagtccatggacatta

SEQ ID NO: 12366 - RNA, 22 nt, synthetic construct
  source 1..22: mol_type = other RNA
ttcattatattcaggtagtcca

SEQ ID NO: 12367 - RNA, 22 nt, synthetic construct
  source 1..22: mol_type = other RNA
ttcattcattatattcaggtag

SEQ ID NO: 12368 - RNA, 22 nt, synthetic construct
  source 1..22: mol_type = other RNA
ttcattgaagttttgtgatcca

SEQ ID NO: 12369 - RNA, 22 nt, synthetic construct
  source 1..22: mol_type = other RNA
ttcgatgttgaattaatgtcca

SEQ ID NO: 12370 - RNA, 22 nt, synthetic construct
  source 1..22: mol_type = other RNA
ttctcccacgtttcattgaagt

SEQ ID NO: 12371 - RNA, 22 nt, synthetic construct
  source 1..22: mol_type = other RNA
ttgaagttttgtgatccatcta

SEQ ID NO: 12372 - RNA, 22 nt, synthetic construct
  source 1..22: mol_type = other RNA
ttgaatgtagtccccttaccat

SEQ ID NO: 12373 - RNA, 22 nt, synthetic construct
  source 1..22: mol_type = other RNA
ttgaattaatgtccatggacta

SEQ ID NO: 12374 - RNA, 22 nt, synthetic construct
  source 1..22: mol_type = other RNA
ttgatggtaaggggactacatt

SEQ ID NO: 12375 - RNA, 22 nt, synthetic construct
  source 1..22: mol_type = other RNA
ttgggaggcttgatggtaaggg

SEQ ID NO: 12376 - RNA, 22 nt, synthetic construct
  source 1..22: mol_type = other RNA
ttgtagttctcccacgtttcat

SEQ ID NO: 12377 - RNA, 22 nt, synthetic construct
  source 1..22: mol_type = other RNA
ttgtgatccatctattcgatgt

SEQ ID NO: 12378 - RNA, 22 nt, synthetic construct
  source 1..22: mol_type = other RNA
tttcattcattatattcaggta

SEQ ID NO: 12379 - RNA, 22 nt, synthetic construct
  source 1..22: mol_type = other RNA
tttcattgaagttttgtgatcc

SEQ ID NO: 12380 - RNA, 22 nt, synthetic construct
  source 1..22: mol_type = other RNA
tttgggaggcttgatggtaagg

SEQ ID NO: 12381 - RNA, 22 nt, synthetic construct
  source 1..22: mol_type = other RNA
tttgtagttctcccacgtttca

SEQ ID NO: 12382 - RNA, 22 nt, synthetic construct
  source 1..22: mol_type = other RNA
tttgtgatccatctattcgatg

SEQ ID NO: 12383 - RNA, 22 nt, synthetic construct
  source 1..22: mol_type = other RNA
ttttgggaggcttgatggtaag

SEQ ID NO: 12384 - RNA, 22 nt, synthetic construct
  source 1..22: mol_type = other RNA
ttttgtgatccatctattcgat

SEQ ID NO: 12385 - RNA, 20 nt, synthetic construct
  source 1..20: mol_type = other RNA
aaaaagatacctgaataacc

SEQ ID NO: 12386 - RNA, 20 nt, synthetic construct
  source 1..20: mol_type = other RNA
aaaacaaagatttggtgttt

SEQ ID NO: 12387 - RNA, 20 nt, synthetic construct
  source 1..20: mol_type = other RNA
aaaacaccaaatctttgttt

SEQ ID NO: 12388 - RNA, 20 nt, synthetic construct
  source 1..20: mol_type = other RNA
aaaacataattagattgctt

SEQ ID NO: 12389 - RNA, 20 nt, synthetic construct
  source 1..20: mol_type = other RNA
aaaacttttcttttcaggag

SEQ ID NO: 12390 - RNA, 20 nt, synthetic construct
  source 1..20: mol_type = other RNA
aaaagatacctgaataaccc

SEQ ID NO: 12391 - RNA, 20 nt, synthetic construct
  source 1..20: mol_type = other RNA
aaaaggacacttcaactgtc

SEQ ID NO: 12392 - RNA, 20 nt, synthetic construct
  source 1..20: mol_type = other RNA
aaaattctcctgaaaagaaa

SEQ ID NO: 12393 - RNA, 20 nt, synthetic construct
  source 1..20: mol_type = other RNA
aaacaaagatttggtgtttt

SEQ ID NO: 12394 - RNA, 20 nt, synthetic construct
  source 1..20: mol_type = other RNA
aaacaccaaatctttgtttt

SEQ ID NO: 12395 - RNA, 20 nt, synthetic construct
  source 1..20: mol_type = other RNA
aaacataattagattgcttc

SEQ ID NO: 12396 - RNA, 20 nt, synthetic construct
  source 1..20: mol_type = other RNA
aaaccaactatacgctacat

SEQ ID NO: 12397 - RNA, 20 nt, synthetic construct
  source 1..20: mol_type = other RNA
aaacttttcttttcaggaga

SEQ ID NO: 12398 - RNA, 20 nt, synthetic construct
  source 1..20: mol_type = other RNA
aaagacaacaaacattatat

SEQ ID NO: 12399 - RNA, 20 nt, synthetic construct
  source 1..20: mol_type = other RNA
aaagatacctgaataaccct

SEQ ID NO: 12400 - RNA, 20 nt, synthetic construct
  source 1..20: mol_type = other RNA
aaagatttggtgttttctac

SEQ ID NO: 12401 - RNA, 20 nt, synthetic construct
  source 1..20: mol_type = other RNA
aaagcaaaaggacacttcaa

SEQ ID NO: 12402 - RNA, 20 nt, synthetic construct
  source 1..20: mol_type = other RNA
aaaggacacttcaactgtcc

SEQ ID NO: 12403 - RNA, 20 nt, synthetic construct
  source 1..20: mol_type = other RNA
aaagtattggtatcagaaaa

SEQ ID NO: 12404 - RNA, 20 nt, synthetic construct
  source 1..20: mol_type = other RNA
aaataaagtattggtatcag

SEQ ID NO: 12405 - RNA, 20 nt, synthetic construct
  source 1..20: mol_type = other RNA
aaatcacgaaaccaactata

SEQ ID NO: 12406 - RNA, 20 nt, synthetic construct
  source 1..20: mol_type = other RNA
aaatctttgttttccgggat

SEQ ID NO: 12407 - RNA, 20 nt, synthetic construct
  source 1..20: mol_type = other RNA
aaattctcctgaaaagaaaa

SEQ ID NO: 12408 - RNA, 20 nt, synthetic construct
  source 1..20: mol_type = other RNA
aacaaagatttggtgttttc

SEQ ID NO: 12409 - RNA, 20 nt, synthetic construct
  source 1..20: mol_type = other RNA
aacaccaaatctttgttttc

SEQ ID NO: 12410 - RNA, 20 nt, synthetic construct
  source 1..20: mol_type = other RNA
aacataattagattgcttca

SEQ ID NO: 12411 - RNA, 20 nt, synthetic construct
  source 1..20: mol_type = other RNA
aaccaaaattctcctgaaaa

SEQ ID NO: 12412 - RNA, 20 nt, synthetic construct
  source 1..20: mol_type = other RNA
aaccaactatacgctacatc

SEQ ID NO: 12413 - RNA, 20 nt, synthetic construct
  source 1..20: mol_type = other RNA
aaccctctggacagttgaag

SEQ ID NO: 12414 - RNA, 20 nt, synthetic construct
  source 1..20: mol_type = other RNA
aactagatgtagcgtatagt

SEQ ID NO: 12415 - RNA, 20 nt, synthetic construct
  source 1..20: mol_type = other RNA
aactatacgctacatctagt

SEQ ID NO: 12416 - RNA, 20 nt, synthetic construct
  source 1..20: mol_type = other RNA
aactcaattcgtaaaacata

SEQ ID NO: 12417 - RNA, 20 nt, synthetic construct
  source 1..20: mol_type = other RNA
aactgtccagagggttattc

SEQ ID NO: 12418 - RNA, 20 nt, synthetic construct
  source 1..20: mol_type = other RNA
aacttttcttttcaggagaa

SEQ ID NO: 12419 - RNA, 20 nt, synthetic construct
  source 1..20: mol_type = other RNA
aagacaacaaacattatatt

SEQ ID NO: 12420 - RNA, 20 nt, synthetic construct
  source 1..20: mol_type = other RNA
aagactggaaagacaacaaa

SEQ ID NO: 12421 - RNA, 20 nt, synthetic construct
  source 1..20: mol_type = other RNA
aagatacctgaataaccctc

SEQ ID NO: 12422 - RNA, 20 nt, synthetic construct
  source 1..20: mol_type = other RNA
aagatatactccatagtgaa

SEQ ID NO: 12423 - RNA, 20 nt, synthetic construct
  source 1..20: mol_type = other RNA
aagatttggtgttttctact

SEQ ID NO: 12424 - RNA, 20 nt, synthetic construct
  source 1..20: mol_type = other RNA
aagcaaaaggacacttcaac

SEQ ID NO: 12425 - RNA, 20 nt, synthetic construct
  source 1..20: mol_type = other RNA
aagcaatctaattatgtttt

SEQ ID NO: 12426 - RNA, 20 nt, synthetic construct
  source 1..20: mol_type = other RNA
aaggacacttcaactgtcca

SEQ ID NO: 12427 - RNA, 20 nt, synthetic construct
  source 1..20: mol_type = other RNA
aagtagaaaacaccaaatct

SEQ ID NO: 12428 - RNA, 20 nt, synthetic construct
  source 1..20: mol_type = other RNA
aagtattggtatcagaaaaa

SEQ ID NO: 12429 - RNA, 20 nt, synthetic construct
  source 1..20: mol_type = other RNA
aagtgtccttttgctttgtg

SEQ ID NO: 12430 - RNA, 20 nt, synthetic construct
  source 1..20: mol_type = other RNA
aataaagtattggtatcaga

SEQ ID NO: 12431 - RNA, 20 nt, synthetic construct
  source 1..20: mol_type = other RNA
aataaccctctggacagttg

SEQ ID NO: 12432 - RNA, 20 nt, synthetic construct
  source 1..20: mol_type = other RNA
aatataatgtttgttgtctt

SEQ ID NO: 12433 - RNA, 20 nt, synthetic construct
  source 1..20: mol_type = other RNA
aatattctttttacttggga

SEQ ID NO: 12434 - RNA, 20 nt, synthetic construct
  source 1..20: mol_type = other RNA
aatcacgaaaccaactatac

SEQ ID NO: 12435 - RNA, 20 nt, synthetic construct
  source 1..20: mol_type = other RNA
aatcccggaaaacaaagatt

SEQ ID NO: 12436 - RNA, 20 nt, synthetic construct
  source 1..20: mol_type = other RNA
aatcgcaactagatgtagcg

SEQ ID NO: 12437 - RNA, 20 nt, synthetic construct
  source 1..20: mol_type = other RNA
aatctaattatgttttacga

SEQ ID NO: 12438 - RNA, 20 nt, synthetic construct
  source 1..20: mol_type = other RNA
aatctttgttttccgggatt

SEQ ID NO: 12439 - RNA, 20 nt, synthetic construct
  source 1..20: mol_type = other RNA
aatgcaatcccggaaaacaa

SEQ ID NO: 12440 - RNA, 20 nt, synthetic construct
  source 1..20: mol_type = other RNA
aatgtccccaatgcaatccc

SEQ ID NO: 12441 - RNA, 20 nt, synthetic construct
  source 1..20: mol_type = other RNA
aatgtttgttgtctttccag

SEQ ID NO: 12442 - RNA, 20 nt, synthetic construct
  source 1..20: mol_type = other RNA
aattagattgcttcactatg

SEQ ID NO: 12443 - RNA, 20 nt, synthetic construct
  source 1..20: mol_type = other RNA
aattatgttttacgaattga

SEQ ID NO: 12444 - RNA, 20 nt, synthetic construct
  source 1..20: mol_type = other RNA
aattcgtaaaacataattag

SEQ ID NO: 12445 - RNA, 20 nt, synthetic construct
  source 1..20: mol_type = other RNA
aattctcctgaaaagaaaag

SEQ ID NO: 12446 - RNA, 20 nt, synthetic construct
  source 1..20: mol_type = other RNA
aattgagttggaagactgga

SEQ ID NO: 12447 - RNA, 20 nt, synthetic construct
  source 1..20: mol_type = other RNA
aattttggttgggcctagag

SEQ ID NO: 12448 - RNA, 20 nt, synthetic construct
  source 1..20: mol_type = other RNA
acaaagatttggtgttttct

SEQ ID NO: 12449 - RNA, 20 nt, synthetic construct
  source 1..20: mol_type = other RNA
acaaagcaaaaggacacttc

SEQ ID NO: 12450 - RNA, 20 nt, synthetic construct
  source 1..20: mol_type = other RNA
acaacaaacattatattgaa

SEQ ID NO: 12451 - RNA, 20 nt, synthetic construct
  source 1..20: mol_type = other RNA
acaccaaatctttgttttcc

SEQ ID NO: 12452 - RNA, 20 nt, synthetic construct
  source 1..20: mol_type = other RNA
acacttcaactgtccagagg

SEQ ID NO: 12453 - RNA, 20 nt, synthetic construct
  source 1..20: mol_type = other RNA
acagatttttaaaacttttc

SEQ ID NO: 12454 - RNA, 20 nt, synthetic construct
  source 1..20: mol_type = other RNA
acagttgaagtgtccttttg

SEQ ID NO: 12455 - RNA, 20 nt, synthetic construct
  source 1..20: mol_type = other RNA
acataattagattgcttcac

SEQ ID NO: 12456 - RNA, 20 nt, synthetic construct
  source 1..20: mol_type = other RNA
acatctagttgcgattactg

SEQ ID NO: 12457 - RNA, 20 nt, synthetic construct
  source 1..20: mol_type = other RNA
acattgccagtaatcgcaac

SEQ ID NO: 12458 - RNA, 20 nt, synthetic construct
  source 1..20: mol_type = other RNA
accaaaattctcctgaaaag

SEQ ID NO: 12459 - RNA, 20 nt, synthetic construct
  source 1..20: mol_type = other RNA
accaaatctttgttttccgg

SEQ ID NO: 12460 - RNA, 20 nt, synthetic construct
  source 1..20: mol_type = other RNA
accaactatacgctacatct

SEQ ID NO: 12461 - RNA, 20 nt, synthetic construct
  source 1..20: mol_type = other RNA
accctctggacagttgaagt

SEQ ID NO: 12462 - RNA, 20 nt, synthetic construct
  source 1..20: mol_type = other RNA
acctgaataaccctctggac

SEQ ID NO: 12463 - RNA, 20 nt, synthetic construct
  source 1..20: mol_type = other RNA
acgaaaccaactatacgcta

SEQ ID NO: 12464 - RNA, 20 nt, synthetic construct
  source 1..20: mol_type = other RNA
acgaattgagttggaagact

SEQ ID NO: 12465 - RNA, 20 nt, synthetic construct
  source 1..20: mol_type = other RNA
acgctacatctagttgcgat

SEQ ID NO: 12466 - RNA, 20 nt, synthetic construct
  source 1..20: mol_type = other RNA
actagatgtagcgtatagtt

SEQ ID NO: 12467 - RNA, 20 nt, synthetic construct
  source 1..20: mol_type = other RNA
actatacgctacatctagtt

SEQ ID NO: 12468 - RNA, 20 nt, synthetic construct
  source 1..20: mol_type = other RNA
actatggagtatatcttctc

SEQ ID NO: 12469 - RNA, 20 nt, synthetic construct
  source 1..20: mol_type = other RNA
actcaattcgtaaaacataa

SEQ ID NO: 12470 - RNA, 20 nt, synthetic construct
  source 1..20: mol_type = other RNA
actcacagatttttaaaact

SEQ ID NO: 12471 - RNA, 20 nt, synthetic construct
  source 1..20: mol_type = other RNA
actccatagtgaagcaatct

SEQ ID NO: 12472 - RNA, 20 nt, synthetic construct
  source 1..20: mol_type = other RNA
actggaaagacaacaaacat

SEQ ID NO: 12473 - RNA, 20 nt, synthetic construct
  source 1..20: mol_type = other RNA
actggcaatgtccccaatgc

SEQ ID NO: 12474 - RNA, 20 nt, synthetic construct
  source 1..20: mol_type = other RNA
actgtccagagggttattca

SEQ ID NO: 12475 - RNA, 20 nt, synthetic construct
  source 1..20: mol_type = other RNA
acttcaactgtccagagggt

SEQ ID NO: 12476 - RNA, 20 nt, synthetic construct
  source 1..20: mol_type = other RNA
acttgggaaatcacgaaacc

SEQ ID NO: 12477 - RNA, 20 nt, synthetic construct
  source 1..20: mol_type = other RNA
acttgggatcacaaagcaaa

SEQ ID NO: 12478 - RNA, 20 nt, synthetic construct
  source 1..20: mol_type = other RNA
acttttcttttcaggagaat

SEQ ID NO: 12479 - RNA, 20 nt, synthetic construct
  source 1..20: mol_type = other RNA
agaaaaagatacctgaataa

SEQ ID NO: 12480 - RNA, 20 nt, synthetic construct
  source 1..20: mol_type = other RNA
agaaaacaccaaatctttgt

SEQ ID NO: 12481 - RNA, 20 nt, synthetic construct
  source 1..20: mol_type = other RNA
agaagatatactccatagtg

SEQ ID NO: 12482 - RNA, 20 nt, synthetic construct
  source 1..20: mol_type = other RNA
agaattttggttgggcctag

SEQ ID NO: 12483 - RNA, 20 nt, synthetic construct
  source 1..20: mol_type = other RNA
agacaacaaacattatattg

SEQ ID NO: 12484 - RNA, 20 nt, synthetic construct
  source 1..20: mol_type = other RNA
agactggaaagacaacaaac

SEQ ID NO: 12485 - RNA, 20 nt, synthetic construct
  source 1..20: mol_type = other RNA
agagaagatatactccatag

SEQ ID NO: 12486 - RNA, 20 nt, synthetic construct
  source 1..20: mol_type = other RNA
agagggttattcaggtatct

SEQ ID NO: 12487 - RNA, 20 nt, synthetic construct
  source 1..20: mol_type = other RNA
agatacctgaataaccctct

SEQ ID NO: 12488 - RNA, 20 nt, synthetic construct
  source 1..20: mol_type = other RNA
agatatactccatagtgaag

SEQ ID NO: 12489 - RNA, 20 nt, synthetic construct
  source 1..20: mol_type = other RNA
agatgtagcgtatagttggt

SEQ ID NO: 12490 - RNA, 20 nt, synthetic construct
  source 1..20: mol_type = other RNA
agattgcttcactatggagt

SEQ ID NO: 12491 - RNA, 20 nt, synthetic construct
  source 1..20: mol_type = other RNA
agatttggtgttttctactt

SEQ ID NO: 12492 - RNA, 20 nt, synthetic construct
  source 1..20: mol_type = other RNA
agcaaaaggacacttcaact

SEQ ID NO: 12493 - RNA, 20 nt, synthetic construct
  source 1..20: mol_type = other RNA
agcaatctaattatgtttta

SEQ ID NO: 12494 - RNA, 20 nt, synthetic construct
  source 1..20: mol_type = other RNA
agcgtatagttggtttcgtg

SEQ ID NO: 12495 - RNA, 20 nt, synthetic construct
  source 1..20: mol_type = other RNA
aggacacttcaactgtccag

SEQ ID NO: 12496 - RNA, 20 nt, synthetic construct
  source 1..20: mol_type = other RNA
aggagaattttggttgggcc

SEQ ID NO: 12497 - RNA, 20 nt, synthetic construct
  source 1..20: mol_type = other RNA
aggcccaaccaaaattctcc

SEQ ID NO: 12498 - RNA, 20 nt, synthetic construct
  source 1..20: mol_type = other RNA
agggttattcaggtatcttt

SEQ ID NO: 12499 - RNA, 20 nt, synthetic construct
  source 1..20: mol_type = other RNA
aggtatctttttctgatacc

SEQ ID NO: 12500 - RNA, 20 nt, synthetic construct
  source 1..20: mol_type = other RNA
agtaatcgcaactagatgta

SEQ ID NO: 12501 - RNA, 20 nt, synthetic construct
  source 1..20: mol_type = other RNA
agtagaaaacaccaaatctt

SEQ ID NO: 12502 - RNA, 20 nt, synthetic construct
  source 1..20: mol_type = other RNA
agtatatcttctctaggccc

SEQ ID NO: 12503 - RNA, 20 nt, synthetic construct
  source 1..20: mol_type = other RNA
agtattggtatcagaaaaag

SEQ ID NO: 12504 - RNA, 20 nt, synthetic construct
  source 1..20: mol_type = other RNA
agtcttccaactcaattcgt

SEQ ID NO: 12505 - RNA, 20 nt, synthetic construct
  source 1..20: mol_type = other RNA
agtgaagcaatctaattatg

SEQ ID NO: 12506 - RNA, 20 nt, synthetic construct
  source 1..20: mol_type = other RNA
agtgtccttttgctttgtga

SEQ ID NO: 12507 - RNA, 20 nt, synthetic construct
  source 1..20: mol_type = other RNA
agttgaagtgtccttttgct

SEQ ID NO: 12508 - RNA, 20 nt, synthetic construct
  source 1..20: mol_type = other RNA
agttgcgattactggcaatg

SEQ ID NO: 12509 - RNA, 20 nt, synthetic construct
  source 1..20: mol_type = other RNA
agttggaagactggaaagac

SEQ ID NO: 12510 - RNA, 20 nt, synthetic construct
  source 1..20: mol_type = other RNA
agttggtttcgtgatttccc

SEQ ID NO: 12511 - RNA, 20 nt, synthetic construct
  source 1..20: mol_type = other RNA
ataaagtattggtatcagaa

SEQ ID NO: 12512 - RNA, 20 nt, synthetic construct
  source 1..20: mol_type = other RNA
ataaccctctggacagttga

SEQ ID NO: 12513 - RNA, 20 nt, synthetic construct
  source 1..20: mol_type = other RNA
ataatgtttgttgtctttcc

SEQ ID NO: 12514 - RNA, 20 nt, synthetic construct
  source 1..20: mol_type = other RNA
ataattagattgcttcacta

SEQ ID NO: 12515 - RNA, 20 nt, synthetic construct
  source 1..20: mol_type = other RNA
atacctgaataaccctctgg

SEQ ID NO: 12516 - RNA, 20 nt, synthetic construct
  source 1..20: mol_type = other RNA
atacgctacatctagttgcg

SEQ ID NO: 12517 - RNA, 20 nt, synthetic construct
  source 1..20: mol_type = other RNA
atactccatagtgaagcaat

SEQ ID NO: 12518 - RNA, 20 nt, synthetic construct
  source 1..20: mol_type = other RNA
atagtgaagcaatctaatta

SEQ ID NO: 12519 - RNA, 20 nt, synthetic construct
  source 1..20: mol_type = other RNA
atagttggtttcgtgatttc

SEQ ID NO: 12520 - RNA, 20 nt, synthetic construct
  source 1..20: mol_type = other RNA
atataatgtttgttgtcttt

SEQ ID NO: 12521 - RNA, 20 nt, synthetic construct
  source 1..20: mol_type = other RNA
atatactccatagtgaagca

SEQ ID NO: 12522 - RNA, 20 nt, synthetic construct
  source 1..20: mol_type = other RNA
atatcttctctaggcccaac

SEQ ID NO: 12523 - RNA, 20 nt, synthetic construct
  source 1..20: mol_type = other RNA
atattctttttacttgggaa

SEQ ID NO: 12524 - RNA, 20 nt, synthetic construct
  source 1..20: mol_type = other RNA
atcacaaagcaaaaggacac

SEQ ID NO: 12525 - RNA, 20 nt, synthetic construct
  source 1..20: mol_type = other RNA
atcacgaaaccaactatacg

SEQ ID NO: 12526 - RNA, 20 nt, synthetic construct
  source 1..20: mol_type = other RNA
atcagaaaaagatacctgaa

SEQ ID NO: 12527 - RNA, 20 nt, synthetic construct
  source 1..20: mol_type = other RNA
atcccaagtagaaaacacca

SEQ ID NO: 12528 - RNA, 20 nt, synthetic construct
  source 1..20: mol_type = other RNA
atcccggaaaacaaagattt

SEQ ID NO: 12529 - RNA, 20 nt, synthetic construct
  source 1..20: mol_type = other RNA
atcgcaactagatgtagcgt

SEQ ID NO: 12530 - RNA, 20 nt, synthetic construct
  source 1..20: mol_type = other RNA
atctaattatgttttacgaa

SEQ ID NO: 12531 - RNA, 20 nt, synthetic construct
  source 1..20: mol_type = other RNA
atctagttgcgattactggc

SEQ ID NO: 12532 - RNA, 20 nt, synthetic construct
  source 1..20: mol_type = other RNA
atcttctctaggcccaacca

SEQ ID NO: 12533 - RNA, 20 nt, synthetic construct
  source 1..20: mol_type = other RNA
atctttgttttccgggattg

SEQ ID NO: 12534 - RNA, 20 nt, synthetic construct
  source 1..20: mol_type = other RNA
atctttttctgataccaata

SEQ ID NO: 12535 - RNA, 20 nt, synthetic construct
  source 1..20: mol_type = other RNA
atgcaatcccggaaaacaaa

SEQ ID NO: 12536 - RNA, 20 nt, synthetic construct
  source 1..20: mol_type = other RNA
atggagtatatcttctctag

SEQ ID NO: 12537 - RNA, 20 nt, synthetic construct
  source 1..20: mol_type = other RNA
atgtagcgtatagttggttt

SEQ ID NO: 12538 - RNA, 20 nt, synthetic construct
  source 1..20: mol_type = other RNA
atgtccccaatgcaatcccg

SEQ ID NO: 12539 - RNA, 20 nt, synthetic construct
  source 1..20: mol_type = other RNA
atgtttgttgtctttccagt

SEQ ID NO: 12540 - RNA, 20 nt, synthetic construct
  source 1..20: mol_type = other RNA
atgttttacgaattgagttg

SEQ ID NO: 12541 - RNA, 20 nt, synthetic construct
  source 1..20: mol_type = other RNA
attactggcaatgtccccaa

SEQ ID NO: 12542 - RNA, 20 nt, synthetic construct
  source 1..20: mol_type = other RNA
attagattgcttcactatgg

SEQ ID NO: 12543 - RNA, 20 nt, synthetic construct
  source 1..20: mol_type = other RNA
attatgttttacgaattgag

SEQ ID NO: 12544 - RNA, 20 nt, synthetic construct
  source 1..20: mol_type = other RNA
attcaatataatgtttgttg

SEQ ID NO: 12545 - RNA, 20 nt, synthetic construct
  source 1..20: mol_type = other RNA
attcaggtatctttttctga

SEQ ID NO: 12546 - RNA, 20 nt, synthetic construct
  source 1..20: mol_type = other RNA
attcgtaaaacataattaga

SEQ ID NO: 12547 - RNA, 20 nt, synthetic construct
  source 1..20: mol_type = other RNA
attctcctgaaaagaaaagt

SEQ ID NO: 12548 - RNA, 20 nt, synthetic construct
  source 1..20: mol_type = other RNA
attctttttacttgggaaat

SEQ ID NO: 12549 - RNA, 20 nt, synthetic construct
  source 1..20: mol_type = other RNA
attgagttggaagactggaa

SEQ ID NO: 12550 - RNA, 20 nt, synthetic construct
  source 1..20: mol_type = other RNA
attgcattggggacattgcc

SEQ ID NO: 12551 - RNA, 20 nt, synthetic construct
  source 1..20: mol_type = other RNA
attgccagtaatcgcaacta

SEQ ID NO: 12552 - RNA, 20 nt, synthetic construct
  source 1..20: mol_type = other RNA
attgcttcactatggagtat

SEQ ID NO: 12553 - RNA, 20 nt, synthetic construct
  source 1..20: mol_type = other RNA
attggggacattgccagtaa

SEQ ID NO: 12554 - RNA, 20 nt, synthetic construct
  source 1..20: mol_type = other RNA
attggtatcagaaaaagata

SEQ ID NO: 12555 - RNA, 20 nt, synthetic construct
  source 1..20: mol_type = other RNA
atttcccaagtaaaaagaat

SEQ ID NO: 12556 - RNA, 20 nt, synthetic construct
  source 1..20: mol_type = other RNA
atttggtgttttctacttgg

SEQ ID NO: 12557 - RNA, 20 nt, synthetic construct
  source 1..20: mol_type = other RNA
attttggttgggcctagaga

SEQ ID NO: 12558 - RNA, 20 nt, synthetic construct
  source 1..20: mol_type = other RNA
caaaaggacacttcaactgt

SEQ ID NO: 12559 - RNA, 20 nt, synthetic construct
  source 1..20: mol_type = other RNA
caaaattctcctgaaaagaa

SEQ ID NO: 12560 - RNA, 20 nt, synthetic construct
  source 1..20: mol_type = other RNA
caaagatttggtgttttcta

SEQ ID NO: 12561 - RNA, 20 nt, synthetic construct
  source 1..20: mol_type = other RNA
caaagcaaaaggacacttca

SEQ ID NO: 12562 - RNA, 20 nt, synthetic construct
  source 1..20: mol_type = other RNA
caaatctttgttttccggga

SEQ ID NO: 12563 - RNA, 20 nt, synthetic construct
  source 1..20: mol_type = other RNA
caacaaacattatattgaat

SEQ ID NO: 12564 - RNA, 20 nt, synthetic construct
  source 1..20: mol_type = other RNA
caaccaaaattctcctgaaa

SEQ ID NO: 12565 - RNA, 20 nt, synthetic construct
  source 1..20: mol_type = other RNA
caactagatgtagcgtatag

SEQ ID NO: 12566 - RNA, 20 nt, synthetic construct
  source 1..20: mol_type = other RNA
caactatacgctacatctag

SEQ ID NO: 12567 - RNA, 20 nt, synthetic construct
  source 1..20: mol_type = other RNA
caactcaattcgtaaaacat

SEQ ID NO: 12568 - RNA, 20 nt, synthetic construct
  source 1..20: mol_type = other RNA
caactgtccagagggttatt

SEQ ID NO: 12569 - RNA, 20 nt, synthetic construct
  source 1..20: mol_type = other RNA
caagtaaaaagaatattcaa

SEQ ID NO: 12570 - RNA, 20 nt, synthetic construct
  source 1..20: mol_type = other RNA
caagtagaaaacaccaaatc

SEQ ID NO: 12571 - RNA, 20 nt, synthetic construct
  source 1..20: mol_type = other RNA
caatataatgtttgttgtct

SEQ ID NO: 12572 - RNA, 20 nt, synthetic construct
  source 1..20: mol_type = other RNA
caatcccggaaaacaaagat

SEQ ID NO: 12573 - RNA, 20 nt, synthetic construct
  source 1..20: mol_type = other RNA
caatctaattatgttttacg

SEQ ID NO: 12574 - RNA, 20 nt, synthetic construct
  source 1..20: mol_type = other RNA
caatgcaatcccggaaaaca

SEQ ID NO: 12575 - RNA, 20 nt, synthetic construct
  source 1..20: mol_type = other RNA
caatgtccccaatgcaatcc

SEQ ID NO: 12576 - RNA, 20 nt, synthetic construct
  source 1..20: mol_type = other RNA
caattcgtaaaacataatta

SEQ ID NO: 12577 - RNA, 20 nt, synthetic construct
  source 1..20: mol_type = other RNA
cacaaagcaaaaggacactt

SEQ ID NO: 12578 - RNA, 20 nt, synthetic construct
  source 1..20: mol_type = other RNA
cacagatttttaaaactttt

SEQ ID NO: 12579 - RNA, 20 nt, synthetic construct
  source 1..20: mol_type = other RNA
caccaaatctttgttttccg

SEQ ID NO: 12580 - RNA, 20 nt, synthetic construct
  source 1..20: mol_type = other RNA
cacgaaaccaactatacgct

SEQ ID NO: 12581 - RNA, 20 nt, synthetic construct
  source 1..20: mol_type = other RNA
cactatggagtatatcttct

SEQ ID NO: 12582 - RNA, 20 nt, synthetic construct
  source 1..20: mol_type = other RNA
cacttcaactgtccagaggg

SEQ ID NO: 12583 - RNA, 20 nt, synthetic construct
  source 1..20: mol_type = other RNA
cagaaaaagatacctgaata

SEQ ID NO: 12584 - RNA, 20 nt, synthetic construct
  source 1..20: mol_type = other RNA
cagagggttattcaggtatc

SEQ ID NO: 12585 - RNA, 20 nt, synthetic construct
  source 1..20: mol_type = other RNA
cagatttttaaaacttttct

SEQ ID NO: 12586 - RNA, 20 nt, synthetic construct
  source 1..20: mol_type = other RNA
caggagaattttggttgggc

SEQ ID NO: 12587 - RNA, 20 nt, synthetic construct
  source 1..20: mol_type = other RNA
caggtatctttttctgatac

SEQ ID NO: 12588 - RNA, 20 nt, synthetic construct
  source 1..20: mol_type = other RNA
cagtaatcgcaactagatgt

SEQ ID NO: 12589 - RNA, 20 nt, synthetic construct
  source 1..20: mol_type = other RNA
cagtcttccaactcaattcg

SEQ ID NO: 12590 - RNA, 20 nt, synthetic construct
  source 1..20: mol_type = other RNA
cagttgaagtgtccttttgc

SEQ ID NO: 12591 - RNA, 20 nt, synthetic construct
  source 1..20: mol_type = other RNA
cataattagattgcttcact

SEQ ID NO: 12592 - RNA, 20 nt, synthetic construct
  source 1..20: mol_type = other RNA
catagtgaagcaatctaatt

SEQ ID NO: 12593 - RNA, 20 nt, synthetic construct
  source 1..20: mol_type = other RNA
catctagttgcgattactgg

SEQ ID NO: 12594 - RNA, 20 nt, synthetic construct
  source 1..20: mol_type = other RNA
cattgccagtaatcgcaact

SEQ ID NO: 12595 - RNA, 20 nt, synthetic construct
  source 1..20: mol_type = other RNA
cattggggacattgccagta

SEQ ID NO: 12596 - RNA, 20 nt, synthetic construct
  source 1..20: mol_type = other RNA
ccaaaattctcctgaaaaga

SEQ ID NO: 12597 - RNA, 20 nt, synthetic construct
  source 1..20: mol_type = other RNA
ccaaatctttgttttccggg

SEQ ID NO: 12598 - RNA, 20 nt, synthetic construct
  source 1..20: mol_type = other RNA
ccaaccaaaattctcctgaa

SEQ ID NO: 12599 - RNA, 20 nt, synthetic construct
  source 1..20: mol_type = other RNA
ccaactatacgctacatcta

SEQ ID NO: 12600 - RNA, 20 nt, synthetic construct
  source 1..20: mol_type = other RNA
ccaactcaattcgtaaaaca

SEQ ID NO: 12601 - RNA, 20 nt, synthetic construct
  source 1..20: mol_type = other RNA
ccaagtaaaaagaatattca

SEQ ID NO: 12602 - RNA, 20 nt, synthetic construct
  source 1..20: mol_type = other RNA
ccaagtagaaaacaccaaat

SEQ ID NO: 12603 - RNA, 20 nt, synthetic construct
  source 1..20: mol_type = other RNA
ccaatgcaatcccggaaaac

SEQ ID NO: 12604 - RNA, 20 nt, synthetic construct
  source 1..20: mol_type = other RNA
ccagagggttattcaggtat

SEQ ID NO: 12605 - RNA, 20 nt, synthetic construct
  source 1..20: mol_type = other RNA
ccagtaatcgcaactagatg

SEQ ID NO: 12606 - RNA, 20 nt, synthetic construct
  source 1..20: mol_type = other RNA
ccagtcttccaactcaattc

SEQ ID NO: 12607 - RNA, 20 nt, synthetic construct
  source 1..20: mol_type = other RNA
ccatagtgaagcaatctaat

SEQ ID NO: 12608 - RNA, 20 nt, synthetic construct
  source 1..20: mol_type = other RNA
cccaaccaaaattctcctga

SEQ ID NO: 12609 - RNA, 20 nt, synthetic construct
  source 1..20: mol_type = other RNA
cccaagtaaaaagaatattc

SEQ ID NO: 12610 - RNA, 20 nt, synthetic construct
  source 1..20: mol_type = other RNA
cccaagtagaaaacaccaaa

SEQ ID NO: 12611 - RNA, 20 nt, synthetic construct
  source 1..20: mol_type = other RNA
cccaatgcaatcccggaaaa

SEQ ID NO: 12612 - RNA, 20 nt, synthetic construct
  source 1..20: mol_type = other RNA
ccccaatgcaatcccggaaa

SEQ ID NO: 12613 - RNA, 20 nt, synthetic construct
  source 1..20: mol_type = other RNA
cccggaaaacaaagatttgg

SEQ ID NO: 12614 - RNA, 20 nt, synthetic construct
  source 1..20: mol_type = other RNA
ccctctggacagttgaagtg

SEQ ID NO: 12615 - RNA, 20 nt, synthetic construct
  source 1..20: mol_type = other RNA
ccggaaaacaaagatttggt

SEQ ID NO: 12616 - RNA, 20 nt, synthetic construct
  source 1..20: mol_type = other RNA
ccgggattgcattggggaca

SEQ ID NO: 12617 - RNA, 20 nt, synthetic construct
  source 1..20: mol_type = other RNA
cctagagaagatatactcca

SEQ ID NO: 12618 - RNA, 20 nt, synthetic construct
  source 1..20: mol_type = other RNA
cctctggacagttgaagtgt

SEQ ID NO: 12619 - RNA, 20 nt, synthetic construct
  source 1..20: mol_type = other RNA
cctgaaaagaaaagttttaa

SEQ ID NO: 12620 - RNA, 20 nt, synthetic construct
  source 1..20: mol_type = other RNA
cctgaataaccctctggaca

SEQ ID NO: 12621 - RNA, 20 nt, synthetic construct
  source 1..20: mol_type = other RNA
ccttttgctttgtgatccca

SEQ ID NO: 12622 - RNA, 20 nt, synthetic construct
  source 1..20: mol_type = other RNA
cgaaaccaactatacgctac

SEQ ID NO: 12623 - RNA, 20 nt, synthetic construct
  source 1..20: mol_type = other RNA
cgaattgagttggaagactg

SEQ ID NO: 12624 - RNA, 20 nt, synthetic construct
  source 1..20: mol_type = other RNA
cgattactggcaatgtcccc

SEQ ID NO: 12625 - RNA, 20 nt, synthetic construct
  source 1..20: mol_type = other RNA
cgcaactagatgtagcgtat

SEQ ID NO: 12626 - RNA, 20 nt, synthetic construct
  source 1..20: mol_type = other RNA
cgctacatctagttgcgatt

SEQ ID NO: 12627 - RNA, 20 nt, synthetic construct
  source 1..20: mol_type = other RNA
cggaaaacaaagatttggtg

SEQ ID NO: 12628 - RNA, 20 nt, synthetic construct
  source 1..20: mol_type = other RNA
cgggattgcattggggacat

SEQ ID NO: 12629 - RNA, 20 nt, synthetic construct
  source 1..20: mol_type = other RNA
cgtaaaacataattagattg

SEQ ID NO: 12630 - RNA, 20 nt, synthetic construct
  source 1..20: mol_type = other RNA
cgtatagttggtttcgtgat

SEQ ID NO: 12631 - RNA, 20 nt, synthetic construct
  source 1..20: mol_type = other RNA
cgtgatttcccaagtaaaaa

SEQ ID NO: 12632 - RNA, 20 nt, synthetic construct
  source 1..20: mol_type = other RNA
ctaattatgttttacgaatt

SEQ ID NO: 12633 - RNA, 20 nt, synthetic construct
  source 1..20: mol_type = other RNA
ctacatctagttgcgattac

SEQ ID NO: 12634 - RNA, 20 nt, synthetic construct
  source 1..20: mol_type = other RNA
ctacttgggatcacaaagca

SEQ ID NO: 12635 - RNA, 20 nt, synthetic construct
  source 1..20: mol_type = other RNA
ctagagaagatatactccat

SEQ ID NO: 12636 - RNA, 20 nt, synthetic construct
  source 1..20: mol_type = other RNA
ctagatgtagcgtatagttg

SEQ ID NO: 12637 - RNA, 20 nt, synthetic construct
  source 1..20: mol_type = other RNA
ctaggcccaaccaaaattct

SEQ ID NO: 12638 - RNA, 20 nt, synthetic construct
  source 1..20: mol_type = other RNA
ctagttgcgattactggcaa

SEQ ID NO: 12639 - RNA, 20 nt, synthetic construct
  source 1..20: mol_type = other RNA
ctatacgctacatctagttg

SEQ ID NO: 12640 - RNA, 20 nt, synthetic construct
  source 1..20: mol_type = other RNA
ctatggagtatatcttctct

SEQ ID NO: 12641 - RNA, 20 nt, synthetic construct
  source 1..20: mol_type = other RNA
ctcaattcgtaaaacataat

SEQ ID NO: 12642 - RNA, 20 nt, synthetic construct
  source 1..20: mol_type = other RNA
ctcacagatttttaaaactt

SEQ ID NO: 12643 - RNA, 20 nt, synthetic construct
  source 1..20: mol_type = other RNA
ctccatagtgaagcaatcta

SEQ ID NO: 12644 - RNA, 20 nt, synthetic construct
  source 1..20: mol_type = other RNA
ctcctgaaaagaaaagtttt

SEQ ID NO: 12645 - RNA, 20 nt, synthetic construct
  source 1..20: mol_type = other RNA
ctctaggcccaaccaaaatt

SEQ ID NO: 12646 - RNA, 20 nt, synthetic construct
  source 1..20: mol_type = other RNA
ctctggacagttgaagtgtc

SEQ ID NO: 12647 - RNA, 20 nt, synthetic construct
  source 1..20: mol_type = other RNA
ctgaaaagaaaagttttaaa

SEQ ID NO: 12648 - RNA, 20 nt, synthetic construct
  source 1..20: mol_type = other RNA
ctgaataaccctctggacag

SEQ ID NO: 12649 - RNA, 20 nt, synthetic construct
  source 1..20: mol_type = other RNA
ctggaaagacaacaaacatt

SEQ ID NO: 12650 - RNA, 20 nt, synthetic construct
  source 1..20: mol_type = other RNA
ctggacagttgaagtgtcct

SEQ ID NO: 12651 - RNA, 20 nt, synthetic construct
  source 1..20: mol_type = other RNA
ctggcaatgtccccaatgca

SEQ ID NO: 12652 - RNA, 20 nt, synthetic construct
  source 1..20: mol_type = other RNA
ctgtccagagggttattcag

SEQ ID NO: 12653 - RNA, 20 nt, synthetic construct
  source 1..20: mol_type = other RNA
cttcaactgtccagagggtt

SEQ ID NO: 12654 - RNA, 20 nt, synthetic construct
  source 1..20: mol_type = other RNA
cttcactatggagtatatct

SEQ ID NO: 12655 - RNA, 20 nt, synthetic construct
  source 1..20: mol_type = other RNA
cttccaactcaattcgtaaa

SEQ ID NO: 12656 - RNA, 20 nt, synthetic construct
  source 1..20: mol_type = other RNA
cttctctaggcccaaccaaa

SEQ ID NO: 12657 - RNA, 20 nt, synthetic construct
  source 1..20: mol_type = other RNA
cttgggaaatcacgaaacca

SEQ ID NO: 12658 - RNA, 20 nt, synthetic construct
  source 1..20: mol_type = other RNA
cttgggatcacaaagcaaaa

SEQ ID NO: 12659 - RNA, 20 nt, synthetic construct
  source 1..20: mol_type = other RNA
ctttccagtcttccaactca

SEQ ID NO: 12660 - RNA, 20 nt, synthetic construct
  source 1..20: mol_type = other RNA
ctttgtgatcccaagtagaa

SEQ ID NO: 12661 - RNA, 20 nt, synthetic construct
  source 1..20: mol_type = other RNA
ctttgttttccgggattgca

SEQ ID NO: 12662 - RNA, 20 nt, synthetic construct
  source 1..20: mol_type = other RNA
cttttcaggagaattttggt

SEQ ID NO: 12663 - RNA, 20 nt, synthetic construct
  source 1..20: mol_type = other RNA
cttttcttttcaggagaatt

SEQ ID NO: 12664 - RNA, 20 nt, synthetic construct
  source 1..20: mol_type = other RNA
cttttgctttgtgatcccaa

SEQ ID NO: 12665 - RNA, 20 nt, synthetic construct
  source 1..20: mol_type = other RNA
ctttttacttgggaaatcac

SEQ ID NO: 12666 - RNA, 20 nt, synthetic construct
  source 1..20: mol_type = other RNA
gaaaaagatacctgaataac

SEQ ID NO: 12667 - RNA, 20 nt, synthetic construct
  source 1..20: mol_type = other RNA
gaaaacaaagatttggtgtt

SEQ ID NO: 12668 - RNA, 20 nt, synthetic construct
  source 1..20: mol_type = other RNA
gaaaacaccaaatctttgtt

SEQ ID NO: 12669 - RNA, 20 nt, synthetic construct
  source 1..20: mol_type = other RNA
gaaaccaactatacgctaca

SEQ ID NO: 12670 - RNA, 20 nt, synthetic construct
  source 1..20: mol_type = other RNA
gaaagacaacaaacattata

SEQ ID NO: 12671 - RNA, 20 nt, synthetic construct
  source 1..20: mol_type = other RNA
gaaatcacgaaaccaactat

SEQ ID NO: 12672 - RNA, 20 nt, synthetic construct
  source 1..20: mol_type = other RNA
gaagactggaaagacaacaa

SEQ ID NO: 12673 - RNA, 20 nt, synthetic construct
  source 1..20: mol_type = other RNA
gaagatatactccatagtga

SEQ ID NO: 12674 - RNA, 20 nt, synthetic construct
  source 1..20: mol_type = other RNA
gaagcaatctaattatgttt

SEQ ID NO: 12675 - RNA, 20 nt, synthetic construct
  source 1..20: mol_type = other RNA
gaagtgtccttttgctttgt

SEQ ID NO: 12676 - RNA, 20 nt, synthetic construct
  source 1..20: mol_type = other RNA
gaataaccctctggacagtt

SEQ ID NO: 12677 - RNA, 20 nt, synthetic construct
  source 1..20: mol_type = other RNA
gaatattctttttacttggg

SEQ ID NO: 12678 - RNA, 20 nt, synthetic construct
  source 1..20: mol_type = other RNA
gaattgagttggaagactgg

SEQ ID NO: 12679 - RNA, 20 nt, synthetic construct
  source 1..20: mol_type = other RNA
gaattttggttgggcctaga

SEQ ID NO: 12680 - RNA, 20 nt, synthetic construct
  source 1..20: mol_type = other RNA
gacaacaaacattatattga

SEQ ID NO: 12681 - RNA, 20 nt, synthetic construct
  source 1..20: mol_type = other RNA
gacacttcaactgtccagag

SEQ ID NO: 12682 - RNA, 20 nt, synthetic construct
  source 1..20: mol_type = other RNA
gacagttgaagtgtcctttt

SEQ ID NO: 12683 - RNA, 20 nt, synthetic construct
  source 1..20: mol_type = other RNA
gacattgccagtaatcgcaa

SEQ ID NO: 12684 - RNA, 20 nt, synthetic construct
  source 1..20: mol_type = other RNA
gactggaaagacaacaaaca

SEQ ID NO: 12685 - RNA, 20 nt, synthetic construct
  source 1..20: mol_type = other RNA
gagaagatatactccatagt

SEQ ID NO: 12686 - RNA, 20 nt, synthetic construct
  source 1..20: mol_type = other RNA
gagaattttggttgggccta

SEQ ID NO: 12687 - RNA, 20 nt, synthetic construct
  source 1..20: mol_type = other RNA
gagggttattcaggtatctt

SEQ ID NO: 12688 - RNA, 20 nt, synthetic construct
  source 1..20: mol_type = other RNA
gagtatatcttctctaggcc

SEQ ID NO: 12689 - RNA, 20 nt, synthetic construct
  source 1..20: mol_type = other RNA
gagttggaagactggaaaga

SEQ ID NO: 12690 - RNA, 20 nt, synthetic construct
  source 1..20: mol_type = other RNA
gatacctgaataaccctctg

SEQ ID NO: 12691 - RNA, 20 nt, synthetic construct
  source 1..20: mol_type = other RNA
gatatactccatagtgaagc

SEQ ID NO: 12692 - RNA, 20 nt, synthetic construct
  source 1..20: mol_type = other RNA
gatcacaaagcaaaaggaca

SEQ ID NO: 12693 - RNA, 20 nt, synthetic construct
  source 1..20: mol_type = other RNA
gatcccaagtagaaaacacc

SEQ ID NO: 12694 - RNA, 20 nt, synthetic construct
  source 1..20: mol_type = other RNA
gatgtagcgtatagttggtt

SEQ ID NO: 12695 - RNA, 20 nt, synthetic construct
  source 1..20: mol_type = other RNA
gattactggcaatgtcccca

SEQ ID NO: 12696 - RNA, 20 nt, synthetic construct
  source 1..20: mol_type = other RNA
gattgcattggggacattgc

SEQ ID NO: 12697 - RNA, 20 nt, synthetic construct
  source 1..20: mol_type = other RNA
gattgcttcactatggagta

SEQ ID NO: 12698 - RNA, 20 nt, synthetic construct
  source 1..20: mol_type = other RNA
gatttcccaagtaaaaagaa

SEQ ID NO: 12699 - RNA, 20 nt, synthetic construct
  source 1..20: mol_type = other RNA
gatttggtgttttctacttg

SEQ ID NO: 12700 - RNA, 20 nt, synthetic construct
  source 1..20: mol_type = other RNA
gcaaaaggacacttcaactg

SEQ ID NO: 12701 - RNA, 20 nt, synthetic construct
  source 1..20: mol_type = other RNA
gcaactagatgtagcgtata

SEQ ID NO: 12702 - RNA, 20 nt, synthetic construct
  source 1..20: mol_type = other RNA
gcaatcccggaaaacaaaga

SEQ ID NO: 12703 - RNA, 20 nt, synthetic construct
  source 1..20: mol_type = other RNA
gcaatctaattatgttttac

SEQ ID NO: 12704 - RNA, 20 nt, synthetic construct
  source 1..20: mol_type = other RNA
gcaatgtccccaatgcaatc

SEQ ID NO: 12705 - RNA, 20 nt, synthetic construct
  source 1..20: mol_type = other RNA
gcattggggacattgccagt

SEQ ID NO: 12706 - RNA, 20 nt, synthetic construct
  source 1..20: mol_type = other RNA
gccagtaatcgcaactagat

SEQ ID NO: 12707 - RNA, 20 nt, synthetic construct
  source 1..20: mol_type = other RNA
gcccaaccaaaattctcctg

SEQ ID NO: 12708 - RNA, 20 nt, synthetic construct
  source 1..20: mol_type = other RNA
gcctagagaagatatactcc

SEQ ID NO: 12709 - RNA, 20 nt, synthetic construct
  source 1..20: mol_type = other RNA
gcgattactggcaatgtccc

SEQ ID NO: 12710 - RNA, 20 nt, synthetic construct
  source 1..20: mol_type = other RNA
gcgtatagttggtttcgtga

SEQ ID NO: 12711 - RNA, 20 nt, synthetic construct
  source 1..20: mol_type = other RNA
gctacatctagttgcgatta

SEQ ID NO: 12712 - RNA, 20 nt, synthetic construct
  source 1..20: mol_type = other RNA
gcttcactatggagtatatc

SEQ ID NO: 12713 - RNA, 20 nt, synthetic construct
  source 1..20: mol_type = other RNA
gctttgtgatcccaagtaga

SEQ ID NO: 12714 - RNA, 20 nt, synthetic construct
  source 1..20: mol_type = other RNA
ggaaaacaaagatttggtgt

SEQ ID NO: 12715 - RNA, 20 nt, synthetic construct
  source 1..20: mol_type = other RNA
ggaaagacaacaaacattat

SEQ ID NO: 12716 - RNA, 20 nt, synthetic construct
  source 1..20: mol_type = other RNA
ggaaatcacgaaaccaacta

SEQ ID NO: 12717 - RNA, 20 nt, synthetic construct
  source 1..20: mol_type = other RNA
ggaagactggaaagacaaca

SEQ ID NO: 12718 - RNA, 20 nt, synthetic construct
  source 1..20: mol_type = other RNA
ggacacttcaactgtccaga

SEQ ID NO: 12719 - RNA, 20 nt, synthetic construct
  source 1..20: mol_type = other RNA
ggacagttgaagtgtccttt

SEQ ID NO: 12720 - RNA, 20 nt, synthetic construct
  source 1..20: mol_type = other RNA
ggacattgccagtaatcgca

SEQ ID NO: 12721 - RNA, 20 nt, synthetic construct
  source 1..20: mol_type = other RNA
ggagaattttggttgggcct

SEQ ID NO: 12722 - RNA, 20 nt, synthetic construct
  source 1..20: mol_type = other RNA
ggagtatatcttctctaggc

SEQ ID NO: 12723 - RNA, 20 nt, synthetic construct
  source 1..20: mol_type = other RNA
ggatcacaaagcaaaaggac

SEQ ID NO: 12724 - RNA, 20 nt, synthetic construct
  source 1..20: mol_type = other RNA
ggattgcattggggacattg

SEQ ID NO: 12725 - RNA, 20 nt, synthetic construct
  source 1..20: mol_type = other RNA
ggcaatgtccccaatgcaat

SEQ ID NO: 12726 - RNA, 20 nt, synthetic construct
  source 1..20: mol_type = other RNA
ggcccaaccaaaattctcct

SEQ ID NO: 12727 - RNA, 20 nt, synthetic construct
  source 1..20: mol_type = other RNA
ggcctagagaagatatactc

SEQ ID NO: 12728 - RNA, 20 nt, synthetic construct
  source 1..20: mol_type = other RNA
gggaaatcacgaaaccaact

SEQ ID NO: 12729 - RNA, 20 nt, synthetic construct
  source 1..20: mol_type = other RNA
gggacattgccagtaatcgc

SEQ ID NO: 12730 - RNA, 20 nt, synthetic construct
  source 1..20: mol_type = other RNA
gggatcacaaagcaaaagga

SEQ ID NO: 12731 - RNA, 20 nt, synthetic construct
  source 1..20: mol_type = other RNA
gggattgcattggggacatt

SEQ ID NO: 12732 - RNA, 20 nt, synthetic construct
  source 1..20: mol_type = other RNA
gggcctagagaagatatact

SEQ ID NO: 12733 - RNA, 20 nt, synthetic construct
  source 1..20: mol_type = other RNA
ggggacattgccagtaatcg

SEQ ID NO: 12734 - RNA, 20 nt, synthetic construct
  source 1..20: mol_type = other RNA
gggttattcaggtatctttt

SEQ ID NO: 12735 - RNA, 20 nt, synthetic construct
  source 1..20: mol_type = other RNA
ggtatcagaaaaagatacct

SEQ ID NO: 12736 - RNA, 20 nt, synthetic construct
  source 1..20: mol_type = other RNA
ggtatctttttctgatacca

SEQ ID NO: 12737 - RNA, 20 nt, synthetic construct
  source 1..20: mol_type = other RNA
ggtgttttctacttgggatc

SEQ ID NO: 12738 - RNA, 20 nt, synthetic construct
  source 1..20: mol_type = other RNA
ggttattcaggtatcttttt

SEQ ID NO: 12739 - RNA, 20 nt, synthetic construct
  source 1..20: mol_type = other RNA
ggttgggcctagagaagata

SEQ ID NO: 12740 - RNA, 20 nt, synthetic construct
  source 1..20: mol_type = other RNA
ggtttcgtgatttcccaagt

SEQ ID NO: 12741 - RNA, 20 nt, synthetic construct
  source 1..20: mol_type = other RNA
gtaaaacataattagattgc

SEQ ID NO: 12742 - RNA, 20 nt, synthetic construct
  source 1..20: mol_type = other RNA
gtaatcgcaactagatgtag

SEQ ID NO: 12743 - RNA, 20 nt, synthetic construct
  source 1..20: mol_type = other RNA
gtagaaaacaccaaatcttt

SEQ ID NO: 12744 - RNA, 20 nt, synthetic construct
  source 1..20: mol_type = other RNA
gtagcgtatagttggtttcg

SEQ ID NO: 12745 - RNA, 20 nt, synthetic construct
  source 1..20: mol_type = other RNA
gtatagttggtttcgtgatt

SEQ ID NO: 12746 - RNA, 20 nt, synthetic construct
  source 1..20: mol_type = other RNA
gtatatcttctctaggccca

SEQ ID NO: 12747 - RNA, 20 nt, synthetic construct
  source 1..20: mol_type = other RNA
gtatcagaaaaagatacctg

SEQ ID NO: 12748 - RNA, 20 nt, synthetic construct
  source 1..20: mol_type = other RNA
gtatctttttctgataccaa

SEQ ID NO: 12749 - RNA, 20 nt, synthetic construct
  source 1..20: mol_type = other RNA
gtattggtatcagaaaaaga

SEQ ID NO: 12750 - RNA, 20 nt, synthetic construct
  source 1..20: mol_type = other RNA
gtccagagggttattcaggt

SEQ ID NO: 12751 - RNA, 20 nt, synthetic construct
  source 1..20: mol_type = other RNA
gtccccaatgcaatcccgga

SEQ ID NO: 12752 - RNA, 20 nt, synthetic construct
  source 1..20: mol_type = other RNA
gtccttttgctttgtgatcc

SEQ ID NO: 12753 - RNA, 20 nt, synthetic construct
  source 1..20: mol_type = other RNA
gtcttccaactcaattcgta

SEQ ID NO: 12754 - RNA, 20 nt, synthetic construct
  source 1..20: mol_type = other RNA
gtctttccagtcttccaact

SEQ ID NO: 12755 - RNA, 20 nt, synthetic construct
  source 1..20: mol_type = other RNA
gtgaagcaatctaattatgt

SEQ ID NO: 12756 - RNA, 20 nt, synthetic construct
  source 1..20: mol_type = other RNA
gtgatcccaagtagaaaaca

SEQ ID NO: 12757 - RNA, 20 nt, synthetic construct
  source 1..20: mol_type = other RNA
gtgatttcccaagtaaaaag

SEQ ID NO: 12758 - RNA, 20 nt, synthetic construct
  source 1..20: mol_type = other RNA
gtgtccttttgctttgtgat

SEQ ID NO: 12759 - RNA, 20 nt, synthetic construct
  source 1..20: mol_type = other RNA
gtgttttctacttgggatca

SEQ ID NO: 12760 - RNA, 20 nt, synthetic construct
  source 1..20: mol_type = other RNA
gttattcaggtatctttttc

SEQ ID NO: 12761 - RNA, 20 nt, synthetic construct
  source 1..20: mol_type = other RNA
gttgaagtgtccttttgctt

SEQ ID NO: 12762 - RNA, 20 nt, synthetic construct
  source 1..20: mol_type = other RNA
gttgcgattactggcaatgt

SEQ ID NO: 12763 - RNA, 20 nt, synthetic construct
  source 1..20: mol_type = other RNA
gttggaagactggaaagaca

SEQ ID NO: 12764 - RNA, 20 nt, synthetic construct
  source 1..20: mol_type = other RNA
gttgggcctagagaagatat

SEQ ID NO: 12765 - RNA, 20 nt, synthetic construct
  source 1..20: mol_type = other RNA
gttggtttcgtgatttccca

SEQ ID NO: 12766 - RNA, 20 nt, synthetic construct
  source 1..20: mol_type = other RNA
gttgtctttccagtcttcca

SEQ ID NO: 12767 - RNA, 20 nt, synthetic construct
  source 1..20: mol_type = other RNA
gtttcgtgatttcccaagta

SEQ ID NO: 12768 - RNA, 20 nt, synthetic construct
  source 1..20: mol_type = other RNA
gtttgttgtctttccagtct

SEQ ID NO: 12769 - RNA, 20 nt, synthetic construct
  source 1..20: mol_type = other RNA
gttttacgaattgagttgga

SEQ ID NO: 12770 - RNA, 20 nt, synthetic construct
  source 1..20: mol_type = other RNA
gttttccgggattgcattgg

SEQ ID NO: 12771 - RNA, 20 nt, synthetic construct
  source 1..20: mol_type = other RNA
gttttctacttgggatcaca

SEQ ID NO: 12772 - RNA, 20 nt, synthetic construct
  source 1..20: mol_type = other RNA
taaaacataattagattgct

SEQ ID NO: 12773 - RNA, 20 nt, synthetic construct
  source 1..20: mol_type = other RNA
taaaacttttcttttcagga

SEQ ID NO: 12774 - RNA, 20 nt, synthetic construct
  source 1..20: mol_type = other RNA
taaagtattggtatcagaaa

SEQ ID NO: 12775 - RNA, 20 nt, synthetic construct
  source 1..20: mol_type = other RNA
taaccctctggacagttgaa

SEQ ID NO: 12776 - RNA, 20 nt, synthetic construct
  source 1..20: mol_type = other RNA
taatcgcaactagatgtagc

SEQ ID NO: 12777 - RNA, 20 nt, synthetic construct
  source 1..20: mol_type = other RNA
taatgtttgttgtctttcca

SEQ ID NO: 12778 - RNA, 20 nt, synthetic construct
  source 1..20: mol_type = other RNA
taattagattgcttcactat

SEQ ID NO: 12779 - RNA, 20 nt, synthetic construct
  source 1..20: mol_type = other RNA
taattatgttttacgaattg

SEQ ID NO: 12780 - RNA, 20 nt, synthetic construct
  source 1..20: mol_type = other RNA
tacatctagttgcgattact

SEQ ID NO: 12781 - RNA, 20 nt, synthetic construct
  source 1..20: mol_type = other RNA
tacctgaataaccctctgga

SEQ ID NO: 12782 - RNA, 20 nt, synthetic construct
  source 1..20: mol_type = other RNA
tacgaattgagttggaagac

SEQ ID NO: 12783 - RNA, 20 nt, synthetic construct
  source 1..20: mol_type = other RNA
tacgctacatctagttgcga

SEQ ID NO: 12784 - RNA, 20 nt, synthetic construct
  source 1..20: mol_type = other RNA
tactccatagtgaagcaatc

SEQ ID NO: 12785 - RNA, 20 nt, synthetic construct
  source 1..20: mol_type = other RNA
tactggcaatgtccccaatg

SEQ ID NO: 12786 - RNA, 20 nt, synthetic construct
  source 1..20: mol_type = other RNA
tacttgggaaatcacgaaac

SEQ ID NO: 12787 - RNA, 20 nt, synthetic construct
  source 1..20: mol_type = other RNA
tacttgggatcacaaagcaa

SEQ ID NO: 12788 - RNA, 20 nt, synthetic construct
  source 1..20: mol_type = other RNA
tagaaaacaccaaatctttg

SEQ ID NO: 12789 - RNA, 20 nt, synthetic construct
  source 1..20: mol_type = other RNA
tagagaagatatactccata

SEQ ID NO: 12790 - RNA, 20 nt, synthetic construct
  source 1..20: mol_type = other RNA
tagatgtagcgtatagttgg

SEQ ID NO: 12791 - RNA, 20 nt, synthetic construct
  source 1..20: mol_type = other RNA
tagattgcttcactatggag

SEQ ID NO: 12792 - RNA, 20 nt, synthetic construct
  source 1..20: mol_type = other RNA
tagcgtatagttggtttcgt

SEQ ID NO: 12793 - RNA, 20 nt, synthetic construct
  source 1..20: mol_type = other RNA
taggcccaaccaaaattctc

SEQ ID NO: 12794 - RNA, 20 nt, synthetic construct
  source 1..20: mol_type = other RNA
tagtgaagcaatctaattat

SEQ ID NO: 12795 - RNA, 20 nt, synthetic construct
  source 1..20: mol_type = other RNA
tagttgcgattactggcaat

SEQ ID NO: 12796 - RNA, 20 nt, synthetic construct
  source 1..20: mol_type = other RNA
tagttggtttcgtgatttcc

SEQ ID NO: 12797 - RNA, 20 nt, synthetic construct
  source 1..20: mol_type = other RNA
tataatgtttgttgtctttc

SEQ ID NO: 12798 - RNA, 20 nt, synthetic construct
  source 1..20: mol_type = other RNA
tatacgctacatctagttgc

SEQ ID NO: 12799 - RNA, 20 nt, synthetic construct
  source 1..20: mol_type = other RNA
tatactccatagtgaagcaa

SEQ ID NO: 12800 - RNA, 20 nt, synthetic construct
  source 1..20: mol_type = other RNA
tatagttggtttcgtgattt

SEQ ID NO: 12801 - RNA, 20 nt, synthetic construct
  source 1..20: mol_type = other RNA
tatatcttctctaggcccaa

SEQ ID NO: 12802 - RNA, 20 nt, synthetic construct
  source 1..20: mol_type = other RNA
tatcagaaaaagatacctga

SEQ ID NO: 12803 - RNA, 20 nt, synthetic construct
  source 1..20: mol_type = other RNA
tatcttctctaggcccaacc

SEQ ID NO: 12804 - RNA, 20 nt, synthetic construct
  source 1..20: mol_type = other RNA
tatctttttctgataccaat

SEQ ID NO: 12805 - RNA, 20 nt, synthetic construct
  source 1..20: mol_type = other RNA
tatggagtatatcttctcta

SEQ ID NO: 12806 - RNA, 20 nt, synthetic construct
  source 1..20: mol_type = other RNA
tatgttttacgaattgagtt

SEQ ID NO: 12807 - RNA, 20 nt, synthetic construct
  source 1..20: mol_type = other RNA
tattcaggtatctttttctg

SEQ ID NO: 12808 - RNA, 20 nt, synthetic construct
  source 1..20: mol_type = other RNA
tattctttttacttgggaaa

SEQ ID NO: 12809 - RNA, 20 nt, synthetic construct
  source 1..20: mol_type = other RNA
tattggtatcagaaaaagat

SEQ ID NO: 12810 - RNA, 20 nt, synthetic construct
  source 1..20: mol_type = other RNA
tcaactgtccagagggttat

SEQ ID NO: 12811 - RNA, 20 nt, synthetic construct
  source 1..20: mol_type = other RNA
tcaatataatgtttgttgtc

SEQ ID NO: 12812 - RNA, 20 nt, synthetic construct
  source 1..20: mol_type = other RNA
tcaattcgtaaaacataatt

SEQ ID NO: 12813 - RNA, 20 nt, synthetic construct
  source 1..20: mol_type = other RNA
tcacaaagcaaaaggacact

SEQ ID NO: 12814 - RNA, 20 nt, synthetic construct
  source 1..20: mol_type = other RNA
tcacagatttttaaaacttt

SEQ ID NO: 12815 - RNA, 20 nt, synthetic construct
  source 1..20: mol_type = other RNA
tcacgaaaccaactatacgc

SEQ ID NO: 12816 - RNA, 20 nt, synthetic construct
  source 1..20: mol_type = other RNA
tcactatggagtatatcttc

SEQ ID NO: 12817 - RNA, 20 nt, synthetic construct
  source 1..20: mol_type = other RNA
tcagaaaaagatacctgaat

SEQ ID NO: 12818 - RNA, 20 nt, synthetic construct
  source 1..20: mol_type = other RNA
tcaggagaattttggttggg

SEQ ID NO: 12819 - RNA, 20 nt, synthetic construct
  source 1..20: mol_type = other RNA
tcaggtatctttttctgata

SEQ ID NO: 12820 - RNA, 20 nt, synthetic construct
  source 1..20: mol_type = other RNA
tccaactcaattcgtaaaac

SEQ ID NO: 12821 - RNA, 20 nt, synthetic construct
  source 1..20: mol_type = other RNA
tccagagggttattcaggta

SEQ ID NO: 12822 - RNA, 20 nt, synthetic construct
  source 1..20: mol_type = other RNA
tccagtcttccaactcaatt

SEQ ID NO: 12823 - RNA, 20 nt, synthetic construct
  source 1..20: mol_type = other RNA
tccatagtgaagcaatctaa

SEQ ID NO: 12824 - RNA, 20 nt, synthetic construct
  source 1..20: mol_type = other RNA
tcccaagtaaaaagaatatt

SEQ ID NO: 12825 - RNA, 20 nt, synthetic construct
  source 1..20: mol_type = other RNA
tcccaagtagaaaacaccaa

SEQ ID NO: 12826 - RNA, 20 nt, synthetic construct
  source 1..20: mol_type = other RNA
tccccaatgcaatcccggaa

SEQ ID NO: 12827 - RNA, 20 nt, synthetic construct
  source 1..20: mol_type = other RNA
tcccggaaaacaaagatttg

SEQ ID NO: 12828 - RNA, 20 nt, synthetic construct
  source 1..20: mol_type = other RNA
tccgggattgcattggggac

SEQ ID NO: 12829 - RNA, 20 nt, synthetic construct
  source 1..20: mol_type = other RNA
tcctgaaaagaaaagtttta

SEQ ID NO: 12830 - RNA, 20 nt, synthetic construct
  source 1..20: mol_type = other RNA
tccttttgctttgtgatccc

SEQ ID NO: 12831 - RNA, 20 nt, synthetic construct
  source 1..20: mol_type = other RNA
tcgcaactagatgtagcgta

SEQ ID NO: 12832 - RNA, 20 nt, synthetic construct
  source 1..20: mol_type = other RNA
tcgtaaaacataattagatt

SEQ ID NO: 12833 - RNA, 20 nt, synthetic construct
  source 1..20: mol_type = other RNA
tcgtgatttcccaagtaaaa

SEQ ID NO: 12834 - RNA, 20 nt, synthetic construct
  source 1..20: mol_type = other RNA
tctaattatgttttacgaat

SEQ ID NO: 12835 - RNA, 20 nt, synthetic construct
  source 1..20: mol_type = other RNA
tctacttgggatcacaaagc

SEQ ID NO: 12836 - RNA, 20 nt, synthetic construct
  source 1..20: mol_type = other RNA
tctaggcccaaccaaaattc

SEQ ID NO: 12837 - RNA, 20 nt, synthetic construct
  source 1..20: mol_type = other RNA
tctagttgcgattactggca

SEQ ID NO: 12838 - RNA, 20 nt, synthetic construct
  source 1..20: mol_type = other RNA
tctcctgaaaagaaaagttt

SEQ ID NO: 12839 - RNA, 20 nt, synthetic construct
  source 1..20: mol_type = other RNA
tctctaggcccaaccaaaat

SEQ ID NO: 12840 - RNA, 20 nt, synthetic construct
  source 1..20: mol_type = other RNA
tctggacagttgaagtgtcc

SEQ ID NO: 12841 - RNA, 20 nt, synthetic construct
  source 1..20: mol_type = other RNA
tcttccaactcaattcgtaa

SEQ ID NO: 12842 - RNA, 20 nt, synthetic construct
  source 1..20: mol_type = other RNA
tcttctctaggcccaaccaa

SEQ ID NO: 12843 - RNA, 20 nt, synthetic construct
  source 1..20: mol_type = other RNA
tctttccagtcttccaactc

SEQ ID NO: 12844 - RNA, 20 nt, synthetic construct
  source 1..20: mol_type = other RNA
tctttgttttccgggattgc

SEQ ID NO: 12845 - RNA, 20 nt, synthetic construct
  source 1..20: mol_type = other RNA
tcttttcaggagaattttgg

SEQ ID NO: 12846 - RNA, 20 nt, synthetic construct
  source 1..20: mol_type = other RNA
tctttttacttgggaaatca

SEQ ID NO: 12847 - RNA, 20 nt, synthetic construct
  source 1..20: mol_type = other RNA
tgaagcaatctaattatgtt

SEQ ID NO: 12848 - RNA, 20 nt, synthetic construct
  source 1..20: mol_type = other RNA
tgaagtgtccttttgctttg

SEQ ID NO: 12849 - RNA, 20 nt, synthetic construct
  source 1..20: mol_type = other RNA
tgaataaccctctggacagt

SEQ ID NO: 12850 - RNA, 20 nt, synthetic construct
  source 1..20: mol_type = other RNA
tgaatattctttttacttgg

SEQ ID NO: 12851 - RNA, 20 nt, synthetic construct
  source 1..20: mol_type = other RNA
tgagttggaagactggaaag

SEQ ID NO: 12852 - RNA, 20 nt, synthetic construct
  source 1..20: mol_type = other RNA
tgatcccaagtagaaaacac

SEQ ID NO: 12853 - RNA, 20 nt, synthetic construct
  source 1..20: mol_type = other RNA
tgatttcccaagtaaaaaga

SEQ ID NO: 12854 - RNA, 20 nt, synthetic construct
  source 1..20: mol_type = other RNA
tgcaatcccggaaaacaaag

SEQ ID NO: 12855 - RNA, 20 nt, synthetic construct
  source 1..20: mol_type = other RNA
tgcattggggacattgccag

SEQ ID NO: 12856 - RNA, 20 nt, synthetic construct
  source 1..20: mol_type = other RNA
tgccagtaatcgcaactaga

SEQ ID NO: 12857 - RNA, 20 nt, synthetic construct
  source 1..20: mol_type = other RNA
tgcgattactggcaatgtcc

SEQ ID NO: 12858 - RNA, 20 nt, synthetic construct
  source 1..20: mol_type = other RNA
tgcttcactatggagtatat

SEQ ID NO: 12859 - RNA, 20 nt, synthetic construct
  source 1..20: mol_type = other RNA
tgctttgtgatcccaagtag

SEQ ID NO: 12860 - RNA, 20 nt, synthetic construct
  source 1..20: mol_type = other RNA
tggaaagacaacaaacatta

SEQ ID NO: 12861 - RNA, 20 nt, synthetic construct
  source 1..20: mol_type = other RNA
tggaagactggaaagacaac

SEQ ID NO: 12862 - RNA, 20 nt, synthetic construct
  source 1..20: mol_type = other RNA
tggacagttgaagtgtcctt

SEQ ID NO: 12863 - RNA, 20 nt, synthetic construct
  source 1..20: mol_type = other RNA
tggagtatatcttctctagg

SEQ ID NO: 12864 - RNA, 20 nt, synthetic construct
  source 1..20: mol_type = other RNA
tggcaatgtccccaatgcaa

SEQ ID NO: 12865 - RNA, 20 nt, synthetic construct
  source 1..20: mol_type = other RNA
tgggaaatcacgaaaccaac

SEQ ID NO: 12866 - RNA, 20 nt, synthetic construct
  source 1..20: mol_type = other RNA
tgggatcacaaagcaaaagg

SEQ ID NO: 12867 - RNA, 20 nt, synthetic construct
  source 1..20: mol_type = other RNA
tgggcctagagaagatatac

SEQ ID NO: 12868 - RNA, 20 nt, synthetic construct
  source 1..20: mol_type = other RNA
tggggacattgccagtaatc

SEQ ID NO: 12869 - RNA, 20 nt, synthetic construct
  source 1..20: mol_type = other RNA
tggtatcagaaaaagatacc

SEQ ID NO: 12870 - RNA, 20 nt, synthetic construct
  source 1..20: mol_type = other RNA
tggtgttttctacttgggat

SEQ ID NO: 12871 - RNA, 20 nt, synthetic construct
  source 1..20: mol_type = other RNA
tggttgggcctagagaagat

SEQ ID NO: 12872 - RNA, 20 nt, synthetic construct
  source 1..20: mol_type = other RNA
tggtttcgtgatttcccaag

SEQ ID NO: 12873 - RNA, 20 nt, synthetic construct
  source 1..20: mol_type = other RNA
tgtagcgtatagttggtttc

SEQ ID NO: 12874 - RNA, 20 nt, synthetic construct
  source 1..20: mol_type = other RNA
tgtccagagggttattcagg

SEQ ID NO: 12875 - RNA, 20 nt, synthetic construct
  source 1..20: mol_type = other RNA
tgtccccaatgcaatcccgg

SEQ ID NO: 12876 - RNA, 20 nt, synthetic construct
  source 1..20: mol_type = other RNA
tgtccttttgctttgtgatc

SEQ ID NO: 12877 - RNA, 20 nt, synthetic construct
  source 1..20: mol_type = other RNA
tgtctttccagtcttccaac

SEQ ID NO: 12878 - RNA, 20 nt, synthetic construct
  source 1..20: mol_type = other RNA
tgtgatcccaagtagaaaac

SEQ ID NO: 12879 - RNA, 20 nt, synthetic construct
  source 1..20: mol_type = other RNA
tgttgtctttccagtcttcc

SEQ ID NO: 12880 - RNA, 20 nt, synthetic construct
  source 1..20: mol_type = other RNA
tgtttgttgtctttccagtc

SEQ ID NO: 12881 - RNA, 20 nt, synthetic construct
  source 1..20: mol_type = other RNA
tgttttacgaattgagttgg

SEQ ID NO: 12882 - RNA, 20 nt, synthetic construct
  source 1..20: mol_type = other RNA
tgttttccgggattgcattg

SEQ ID NO: 12883 - RNA, 20 nt, synthetic construct
  source 1..20: mol_type = other RNA
tgttttctacttgggatcac

SEQ ID NO: 12884 - RNA, 20 nt, synthetic construct
  source 1..20: mol_type = other RNA
ttaaaacttttcttttcagg

SEQ ID NO: 12885 - RNA, 20 nt, synthetic construct
  source 1..20: mol_type = other RNA
ttacgaattgagttggaaga

SEQ ID NO: 12886 - RNA, 20 nt, synthetic construct
  source 1..20: mol_type = other RNA
ttactggcaatgtccccaat

SEQ ID NO: 12887 - RNA, 20 nt, synthetic construct
  source 1..20: mol_type = other RNA
ttacttgggaaatcacgaaa

SEQ ID NO: 12888 - RNA, 20 nt, synthetic construct
  source 1..20: mol_type = other RNA
ttagattgcttcactatgga

SEQ ID NO: 12889 - RNA, 20 nt, synthetic construct
  source 1..20: mol_type = other RNA
ttatgttttacgaattgagt

SEQ ID NO: 12890 - RNA, 20 nt, synthetic construct
  source 1..20: mol_type = other RNA
ttattcaggtatctttttct

SEQ ID NO: 12891 - RNA, 20 nt, synthetic construct
  source 1..20: mol_type = other RNA
ttcaactgtccagagggtta

SEQ ID NO: 12892 - RNA, 20 nt, synthetic construct
  source 1..20: mol_type = other RNA
ttcaatataatgtttgttgt

SEQ ID NO: 12893 - RNA, 20 nt, synthetic construct
  source 1..20: mol_type = other RNA
ttcactatggagtatatctt

SEQ ID NO: 12894 - RNA, 20 nt, synthetic construct
  source 1..20: mol_type = other RNA
ttcaggagaattttggttgg

SEQ ID NO: 12895 - RNA, 20 nt, synthetic construct
  source 1..20: mol_type = other RNA
ttcaggtatctttttctgat

SEQ ID NO: 12896 - RNA, 20 nt, synthetic construct
  source 1..20: mol_type = other RNA
ttccaactcaattcgtaaaa

SEQ ID NO: 12897 - RNA, 20 nt, synthetic construct
  source 1..20: mol_type = other RNA
ttccagtcttccaactcaat

SEQ ID NO: 12898 - RNA, 20 nt, synthetic construct
  source 1..20: mol_type = other RNA
ttcccaagtaaaaagaatat

SEQ ID NO: 12899 - RNA, 20 nt, synthetic construct
  source 1..20: mol_type = other RNA
ttccgggattgcattgggga

SEQ ID NO: 12900 - RNA, 20 nt, synthetic construct
  source 1..20: mol_type = other RNA
ttcgtaaaacataattagat

SEQ ID NO: 12901 - RNA, 20 nt, synthetic construct
  source 1..20: mol_type = other RNA
ttcgtgatttcccaagtaaa

SEQ ID NO: 12902 - RNA, 20 nt, synthetic construct
  source 1..20: mol_type = other RNA
ttctacttgggatcacaaag

SEQ ID NO: 12903 - RNA, 20 nt, synthetic construct
  source 1..20: mol_type = other RNA
ttctcctgaaaagaaaagtt

SEQ ID NO: 12904 - RNA, 20 nt, synthetic construct
  source 1..20: mol_type = other RNA
ttctctaggcccaaccaaaa

SEQ ID NO: 12905 - RNA, 20 nt, synthetic construct
  source 1..20: mol_type = other RNA
ttcttttcaggagaattttg

SEQ ID NO: 12906 - RNA, 20 nt, synthetic construct
  source 1..20: mol_type = other RNA
ttctttttacttgggaaatc

SEQ ID NO: 12907 - RNA, 20 nt, synthetic construct
  source 1..20: mol_type = other RNA
ttgaagtgtccttttgcttt

SEQ ID NO: 12908 - RNA, 20 nt, synthetic construct
  source 1..20: mol_type = other RNA
ttgaatattctttttacttg

SEQ ID NO: 12909 - RNA, 20 nt, synthetic construct
  source 1..20: mol_type = other RNA
ttgagttggaagactggaaa

SEQ ID NO: 12910 - RNA, 20 nt, synthetic construct
  source 1..20: mol_type = other RNA
ttgcattggggacattgcca

SEQ ID NO: 12911 - RNA, 20 nt, synthetic construct
  source 1..20: mol_type = other RNA
ttgccagtaatcgcaactag

SEQ ID NO: 12912 - RNA, 20 nt, synthetic construct
  source 1..20: mol_type = other RNA
ttgcgattactggcaatgtc

SEQ ID NO: 12913 - RNA, 20 nt, synthetic construct
  source 1..20: mol_type = other RNA
ttgcttcactatggagtata

SEQ ID NO: 12914 - RNA, 20 nt, synthetic construct
  source 1..20: mol_type = other RNA
ttgctttgtgatcccaagta

SEQ ID NO: 12915 - RNA, 20 nt, synthetic construct
  source 1..20: mol_type = other RNA
ttggaagactggaaagacaa

SEQ ID NO: 12916 - RNA, 20 nt, synthetic construct
  source 1..20: mol_type = other RNA
ttgggaaatcacgaaaccaa

SEQ ID NO: 12917 - RNA, 20 nt, synthetic construct
  source 1..20: mol_type = other RNA
ttgggatcacaaagcaaaag

SEQ ID NO: 12918 - RNA, 20 nt, synthetic construct
  source 1..20: mol_type = other RNA
ttgggcctagagaagatata

SEQ ID NO: 12919 - RNA, 20 nt, synthetic construct
  source 1..20: mol_type = other RNA
ttggggacattgccagtaat

SEQ ID NO: 12920 - RNA, 20 nt, synthetic construct
  source 1..20: mol_type = other RNA
ttggtatcagaaaaagatac

SEQ ID NO: 12921 - RNA, 20 nt, synthetic construct
  source 1..20: mol_type = other RNA
ttggtgttttctacttggga

SEQ ID NO: 12922 - RNA, 20 nt, synthetic construct
  source 1..20: mol_type = other RNA
ttggttgggcctagagaaga

SEQ ID NO: 12923 - RNA, 20 nt, synthetic construct
  source 1..20: mol_type = other RNA
ttggtttcgtgatttcccaa

SEQ ID NO: 12924 - RNA, 20 nt, synthetic construct
  source 1..20: mol_type = other RNA
ttgtctttccagtcttccaa

SEQ ID NO: 12925 - RNA, 20 nt, synthetic construct
  source 1..20: mol_type = other RNA
ttgtgatcccaagtagaaaa

SEQ ID NO: 12926 - RNA, 20 nt, synthetic construct
  source 1..20: mol_type = other RNA
ttgttgtctttccagtcttc

SEQ ID NO: 12927 - RNA, 20 nt, synthetic construct
  source 1..20: mol_type = other RNA
ttgttttccgggattgcatt

SEQ ID NO: 12928 - RNA, 20 nt, synthetic construct
  source 1..20: mol_type = other RNA
tttaaaacttttcttttcag

SEQ ID NO: 12929 - RNA, 20 nt, synthetic construct
  source 1..20: mol_type = other RNA
tttacgaattgagttggaag

SEQ ID NO: 12930 - RNA, 20 nt, synthetic construct
  source 1..20: mol_type = other RNA
tttacttgggaaatcacgaa

SEQ ID NO: 12931 - RNA, 20 nt, synthetic construct
  source 1..20: mol_type = other RNA
tttcaggagaattttggttg

SEQ ID NO: 12932 - RNA, 20 nt, synthetic construct
  source 1..20: mol_type = other RNA
tttccagtcttccaactcaa

SEQ ID NO: 12933 - RNA, 20 nt, synthetic construct
  source 1..20: mol_type = other RNA
tttcccaagtaaaaagaata

SEQ ID NO: 12934 - RNA, 20 nt, synthetic construct
  source 1..20: mol_type = other RNA
tttccgggattgcattgggg

SEQ ID NO: 12935 - RNA, 20 nt, synthetic construct
  source 1..20: mol_type = other RNA
tttcgtgatttcccaagtaa

SEQ ID NO: 12936 - RNA, 20 nt, synthetic construct
  source 1..20: mol_type = other RNA
tttctacttgggatcacaaa

SEQ ID NO: 12937 - RNA, 20 nt, synthetic construct
  source 1..20: mol_type = other RNA
tttcttttcaggagaatttt

SEQ ID NO: 12938 - RNA, 20 nt, synthetic construct
  source 1..20: mol_type = other RNA
tttgctttgtgatcccaagt

SEQ ID NO: 12939 - RNA, 20 nt, synthetic construct
  source 1..20: mol_type = other RNA
tttggtgttttctacttggg

SEQ ID NO: 12940 - RNA, 20 nt, synthetic construct
  source 1..20: mol_type = other RNA
tttggttgggcctagagaag

SEQ ID NO: 12941 - RNA, 20 nt, synthetic construct
  source 1..20: mol_type = other RNA
tttgtgatcccaagtagaaa

SEQ ID NO: 12942 - RNA, 20 nt, synthetic construct
  source 1..20: mol_type = other RNA
tttgttgtctttccagtctt

SEQ ID NO: 12943 - RNA, 20 nt, synthetic construct
  source 1..20: mol_type = other RNA
tttgttttccgggattgcat

SEQ ID NO: 12944 - RNA, 20 nt, synthetic construct
  source 1..20: mol_type = other RNA
ttttacgaattgagttggaa

SEQ ID NO: 12945 - RNA, 20 nt, synthetic construct
  source 1..20: mol_type = other RNA
ttttacttgggaaatcacga

SEQ ID NO: 12946 - RNA, 20 nt, synthetic construct
  source 1..20: mol_type = other RNA
ttttcaggagaattttggtt

SEQ ID NO: 12947 - RNA, 20 nt, synthetic construct
  source 1..20: mol_type = other RNA
ttttccgggattgcattggg

SEQ ID NO: 12948 - RNA, 20 nt, synthetic construct
  source 1..20: mol_type = other RNA
ttttctacttgggatcacaa

SEQ ID NO: 12949 - RNA, 20 nt, synthetic construct
  source 1..20: mol_type = other RNA
ttttcttttcaggagaattt

SEQ ID NO: 12950 - RNA, 20 nt, synthetic construct
  source 1..20: mol_type = other RNA
ttttgctttgtgatcccaag

SEQ ID NO: 12951 - RNA, 20 nt, synthetic construct
  source 1..20: mol_type = other RNA
ttttggttgggcctagagaa

SEQ ID NO: 12952 - RNA, 20 nt, synthetic construct
  source 1..20: mol_type = other RNA
tttttacttgggaaatcacg

SEQ ID NO: 12953 - RNA, 21 nt, synthetic construct
  source 1..21: mol_type = other RNA
aaaaagatacctgaataaccc

SEQ ID NO: 12954 - RNA, 21 nt, synthetic construct
  source 1..21: mol_type = other RNA
aaaacaaagatttggtgtttt

SEQ ID NO: 12955 - RNA, 21 nt, synthetic construct
  source 1..21: mol_type = other RNA
aaaacaccaaatctttgtttt

SEQ ID NO: 12956 - RNA, 21 nt, synthetic construct
  source 1..21: mol_type = other RNA
aaaacataattagattgcttc

SEQ ID NO: 12957 - RNA, 21 nt, synthetic construct
  source 1..21: mol_type = other RNA
aaaacttttcttttcaggaga

SEQ ID NO: 12958 - RNA, 21 nt, synthetic construct
  source 1..21: mol_type = other RNA
aaaagatacctgaataaccct

SEQ ID NO: 12959 - RNA, 21 nt, synthetic construct
  source 1..21: mol_type = other RNA
aaaaggacacttcaactgtcc

SEQ ID NO: 12960 - RNA, 21 nt, synthetic construct
  source 1..21: mol_type = other RNA
aaaattctcctgaaaagaaaa

SEQ ID NO: 12961 - RNA, 21 nt, synthetic construct
  source 1..21: mol_type = other RNA
aaacaaagatttggtgttttc

SEQ ID NO: 12962 - RNA, 21 nt, synthetic construct
  source 1..21: mol_type = other RNA
aaacaccaaatctttgttttc

SEQ ID NO: 12963 - RNA, 21 nt, synthetic construct
  source 1..21: mol_type = other RNA
aaacataattagattgcttca

SEQ ID NO: 12964 - RNA, 21 nt, synthetic construct
  source 1..21: mol_type = other RNA
aaaccaactatacgctacatc

SEQ ID NO: 12965 - RNA, 21 nt, synthetic construct
  source 1..21: mol_type = other RNA
aaacttttcttttcaggagaa

SEQ ID NO: 12966 - RNA, 21 nt, synthetic construct
  source 1..21: mol_type = other RNA
aaagatacctgaataaccctc

SEQ ID NO: 12967 - RNA, 21 nt, synthetic construct
  source 1..21: mol_type = other RNA
aaagatttggtgttttctact

SEQ ID NO: 12968 - RNA, 21 nt, synthetic construct
  source 1..21: mol_type = other RNA
aaagcaaaaggacacttcaac

SEQ ID NO: 12969 - RNA, 21 nt, synthetic construct
  source 1..21: mol_type = other RNA
aaaggacacttcaactgtcca

SEQ ID NO: 12970 - RNA, 21 nt, synthetic construct
  source 1..21: mol_type = other RNA
aaagtattggtatcagaaaaa

SEQ ID NO: 12971 - RNA, 21 nt, synthetic construct
  source 1..21: mol_type = other RNA
aaataaagtattggtatcaga

SEQ ID NO: 12972 - RNA, 21 nt, synthetic construct
  source 1..21: mol_type = other RNA
aaatcacgaaaccaactatac

SEQ ID NO: 12973 - RNA, 21 nt, synthetic construct
  source 1..21: mol_type = other RNA
aaatctttgttttccgggatt

SEQ ID NO: 12974 - RNA, 21 nt, synthetic construct
  source 1..21: mol_type = other RNA
aaattctcctgaaaagaaaag

SEQ ID NO: 12975 - RNA, 21 nt, synthetic construct
  source 1..21: mol_type = other RNA
aacaaagatttggtgttttct

SEQ ID NO: 12976 - RNA, 21 nt, synthetic construct
  source 1..21: mol_type = other RNA
aacaccaaatctttgttttcc

SEQ ID NO: 12977 - RNA, 21 nt, synthetic construct
  source 1..21: mol_type = other RNA
aacataattagattgcttcac

SEQ ID NO: 12978 - RNA, 21 nt, synthetic construct
  source 1..21: mol_type = other RNA
aaccaaaattctcctgaaaag

SEQ ID NO: 12979 - RNA, 21 nt, synthetic construct
  source 1..21: mol_type = other RNA
aaccaactatacgctacatct

SEQ ID NO: 12980 - RNA, 21 nt, synthetic construct
  source 1..21: mol_type = other RNA
aaccctctggacagttgaagt

SEQ ID NO: 12981 - RNA, 21 nt, synthetic construct
  source 1..21: mol_type = other RNA
aactagatgtagcgtatagtt

SEQ ID NO: 12982 - RNA, 21 nt, synthetic construct
  source 1..21: mol_type = other RNA
aactatacgctacatctagtt

SEQ ID NO: 12983 - RNA, 21 nt, synthetic construct
  source 1..21: mol_type = other RNA
aactcaattcgtaaaacataa

SEQ ID NO: 12984 - RNA, 21 nt, synthetic construct
  source 1..21: mol_type = other RNA
aactgtccagagggttattca

SEQ ID NO: 12985 - RNA, 21 nt, synthetic construct
  source 1..21: mol_type = other RNA
aacttttcttttcaggagaat

SEQ ID NO: 12986 - RNA, 21 nt, synthetic construct
  source 1..21: mol_type = other RNA
aagacaacaaacattatattg

SEQ ID NO: 12987 - RNA, 21 nt, synthetic construct
  source 1..21: mol_type = other RNA
aagactggaaagacaacaaac

SEQ ID NO: 12988 - RNA, 21 nt, synthetic construct
  source 1..21: mol_type = other RNA
aagatacctgaataaccctct

SEQ ID NO: 12989 - RNA, 21 nt, synthetic construct
  source 1..21: mol_type = other RNA
aagatatactccatagtgaag

SEQ ID NO: 12990 - RNA, 21 nt, synthetic construct
  source 1..21: mol_type = other RNA
aagatttggtgttttctactt

SEQ ID NO: 12991 - RNA, 21 nt, synthetic construct
  source 1..21: mol_type = other RNA
aagcaaaaggacacttcaact

SEQ ID NO: 12992 - RNA, 21 nt, synthetic construct
  source 1..21: mol_type = other RNA
aaggacacttcaactgtccag

SEQ ID NO: 12993 - RNA, 21 nt, synthetic construct
  source 1..21: mol_type = other RNA
aagtagaaaacaccaaatctt

SEQ ID NO: 12994 - RNA, 21 nt, synthetic construct
  source 1..21: mol_type = other RNA
aagtattggtatcagaaaaag

SEQ ID NO: 12995 - RNA, 21 nt, synthetic construct
  source 1..21: mol_type = other RNA
aagtgtccttttgctttgtga

SEQ ID NO: 12996 - RNA, 21 nt, synthetic construct
  source 1..21: mol_type = other RNA
aataaagtattggtatcagaa

SEQ ID NO: 12997 - RNA, 21 nt, synthetic construct
  source 1..21: mol_type = other RNA
aataaccctctggacagttga

SEQ ID NO: 12998 - RNA, 21 nt, synthetic construct
  source 1..21: mol_type = other RNA
aatattctttttacttgggaa

SEQ ID NO: 12999 - RNA, 21 nt, synthetic construct
  source 1..21: mol_type = other RNA
aatcacgaaaccaactatacg

SEQ ID NO: 13000 - RNA, 21 nt, synthetic construct
  source 1..21: mol_type = other RNA
aatcccggaaaacaaagattt

SEQ ID NO: 13001 - RNA, 21 nt, synthetic construct
  source 1..21: mol_type = other RNA
aatcgcaactagatgtagcgt

SEQ ID NO: 13002 - RNA, 21 nt, synthetic construct
  source 1..21: mol_type = other RNA
aatctttgttttccgggattg

SEQ ID NO: 13003 - RNA, 21 nt, synthetic construct
  source 1..21: mol_type = other RNA
aatgcaatcccggaaaacaaa

SEQ ID NO: 13004 - RNA, 21 nt, synthetic construct
  source 1..21: mol_type = other RNA
aatgtccccaatgcaatcccg

SEQ ID NO: 13005 - RNA, 21 nt, synthetic construct
  source 1..21: mol_type = other RNA
aatgtttgttgtctttccagt

SEQ ID NO: 13006 - RNA, 21 nt, synthetic construct
  source 1..21: mol_type = other RNA
aattagattgcttcactatgg

SEQ ID NO: 13007 - RNA, 21 nt, synthetic construct
  source 1..21: mol_type = other RNA
aattatgttttacgaattgag

SEQ ID NO: 13008 - RNA, 21 nt, synthetic construct
  source 1..21: mol_type = other RNA
aattctcctgaaaagaaaagt

SEQ ID NO: 13009 - RNA, 21 nt, synthetic construct
  source 1..21: mol_type = other RNA
aattgagttggaagactggaa

SEQ ID NO: 13010 - RNA, 21 nt, synthetic construct
  source 1..21: mol_type = other RNA
aattttggttgggcctagaga

SEQ ID NO: 13011 - RNA, 21 nt, synthetic construct
  source 1..21: mol_type = other RNA
acaaagatttggtgttttcta

SEQ ID NO: 13012 - RNA, 21 nt, synthetic construct
  source 1..21: mol_type = other RNA
acaaagcaaaaggacacttca

SEQ ID NO: 13013 - RNA, 21 nt, synthetic construct
  source 1..21: mol_type = other RNA
acaccaaatctttgttttccg

SEQ ID NO: 13014 - RNA, 21 nt, synthetic construct
  source 1..21: mol_type = other RNA
acacttcaactgtccagaggg

SEQ ID NO: 13015 - RNA, 21 nt, synthetic construct
  source 1..21: mol_type = other RNA
acagttgaagtgtccttttgc

SEQ ID NO: 13016 - RNA, 21 nt, synthetic construct
  source 1..21: mol_type = other RNA
acataattagattgcttcact

SEQ ID NO: 13017 - RNA, 21 nt, synthetic construct
  source 1..21: mol_type = other RNA
acatctagttgcgattactgg

SEQ ID NO: 13018 - RNA, 21 nt, synthetic construct
  source 1..21: mol_type = other RNA
acattgccagtaatcgcaact

SEQ ID NO: 13019 - RNA, 21 nt, synthetic construct
  source 1..21: mol_type = other RNA
accaaaattctcctgaaaaga

SEQ ID NO: 13020 - RNA, 21 nt, synthetic construct
  source 1..21: mol_type = other RNA
accaaatctttgttttccggg

SEQ ID NO: 13021 - RNA, 21 nt, synthetic construct
  source 1..21: mol_type = other RNA
accaactatacgctacatcta

SEQ ID NO: 13022 - RNA, 21 nt, synthetic construct
  source 1..21: mol_type = other RNA
accctctggacagttgaagtg

SEQ ID NO: 13023 - RNA, 21 nt, synthetic construct
  source 1..21: mol_type = other RNA
acctgaataaccctctggaca

SEQ ID NO: 13024 - RNA, 21 nt, synthetic construct
  source 1..21: mol_type = other RNA
acgaaaccaactatacgctac

SEQ ID NO: 13025 - RNA, 21 nt, synthetic construct
  source 1..21: mol_type = other RNA
acgaattgagttggaagactg

SEQ ID NO: 13026 - RNA, 21 nt, synthetic construct
  source 1..21: mol_type = other RNA
acgctacatctagttgcgatt

SEQ ID NO: 13027 - RNA, 21 nt, synthetic construct
  source 1..21: mol_type = other RNA
actagatgtagcgtatagttg

SEQ ID NO: 13028 - RNA, 21 nt, synthetic construct
  source 1..21: mol_type = other RNA
actatacgctacatctagttg

SEQ ID NO: 13029 - RNA, 21 nt, synthetic construct
  source 1..21: mol_type = other RNA
actatggagtatatcttctct

SEQ ID NO: 13030 - RNA, 21 nt, synthetic construct
  source 1..21: mol_type = other RNA
actcaattcgtaaaacataat

SEQ ID NO: 13031 - RNA, 21 nt, synthetic construct
  source 1..21: mol_type = other RNA
actcacagatttttaaaactt

SEQ ID NO: 13032 - RNA, 21 nt, synthetic construct
  source 1..21: mol_type = other RNA
actccatagtgaagcaatcta

SEQ ID NO: 13033 - RNA, 21 nt, synthetic construct
  source 1..21: mol_type = other RNA
actggaaagacaacaaacatt

SEQ ID NO: 13034 - RNA, 21 nt, synthetic construct
  source 1..21: mol_type = other RNA
actggcaatgtccccaatgca

SEQ ID NO: 13035 - RNA, 21 nt, synthetic construct
  source 1..21: mol_type = other RNA
actgtccagagggttattcag

SEQ ID NO: 13036 - RNA, 21 nt, synthetic construct
  source 1..21: mol_type = other RNA
acttcaactgtccagagggtt

SEQ ID NO: 13037 - RNA, 21 nt, synthetic construct
  source 1..21: mol_type = other RNA
acttgggaaatcacgaaacca

SEQ ID NO: 13038 - RNA, 21 nt, synthetic construct
  source 1..21: mol_type = other RNA
acttgggatcacaaagcaaaa

SEQ ID NO: 13039 - RNA, 21 nt, synthetic construct
  source 1..21: mol_type = other RNA
acttttcttttcaggagaatt

SEQ ID NO: 13040 - RNA, 21 nt, synthetic construct
  source 1..21: mol_type = other RNA
agaaaaagatacctgaataac

SEQ ID NO: 13041 - RNA, 21 nt, synthetic construct
  source 1..21: mol_type = other RNA
agaaaacaccaaatctttgtt

SEQ ID NO: 13042 - RNA, 21 nt, synthetic construct
  source 1..21: mol_type = other RNA
agaagatatactccatagtga

SEQ ID NO: 13043 - RNA, 21 nt, synthetic construct
  source 1..21: mol_type = other RNA
agaattttggttgggcctaga

SEQ ID NO: 13044 - RNA, 21 nt, synthetic construct
  source 1..21: mol_type = other RNA
agacaacaaacattatattga

SEQ ID NO: 13045 - RNA, 21 nt, synthetic construct
  source 1..21: mol_type = other RNA
agactggaaagacaacaaaca

SEQ ID NO: 13046 - RNA, 21 nt, synthetic construct
  source 1..21: mol_type = other RNA
agagaagatatactccatagt

SEQ ID NO: 13047 - RNA, 21 nt, synthetic construct
  source 1..21: mol_type = other RNA
agagggttattcaggtatctt

SEQ ID NO: 13048 - RNA, 21 nt, synthetic construct
  source 1..21: mol_type = other RNA
agatacctgaataaccctctg

SEQ ID NO: 13049 - RNA, 21 nt, synthetic construct
  source 1..21: mol_type = other RNA
agatatactccatagtgaagc

SEQ ID NO: 13050 - RNA, 21 nt, synthetic construct
  source 1..21: mol_type = other RNA
agatgtagcgtatagttggtt

SEQ ID NO: 13051 - RNA, 21 nt, synthetic construct
  source 1..21: mol_type = other RNA
agattgcttcactatggagta

SEQ ID NO: 13052 - RNA, 21 nt, synthetic construct
  source 1..21: mol_type = other RNA
agatttggtgttttctacttg

SEQ ID NO: 13053 - RNA, 21 nt, synthetic construct
  source 1..21: mol_type = other RNA
agcaaaaggacacttcaactg

SEQ ID NO: 13054 - RNA, 21 nt, synthetic construct
  source 1..21: mol_type = other RNA
agcaatctaattatgttttac

SEQ ID NO: 13055 - RNA, 21 nt, synthetic construct
  source 1..21: mol_type = other RNA
agcgtatagttggtttcgtga

SEQ ID NO: 13056 - RNA, 21 nt, synthetic construct
  source 1..21: mol_type = other RNA
aggacacttcaactgtccaga

SEQ ID NO: 13057 - RNA, 21 nt, synthetic construct
  source 1..21: mol_type = other RNA
aggagaattttggttgggcct

SEQ ID NO: 13058 - RNA, 21 nt, synthetic construct
  source 1..21: mol_type = other RNA
aggcccaaccaaaattctcct

SEQ ID NO: 13059 - RNA, 21 nt, synthetic construct
  source 1..21: mol_type = other RNA
agggttattcaggtatctttt

SEQ ID NO: 13060 - RNA, 21 nt, synthetic construct
  source 1..21: mol_type = other RNA
aggtatctttttctgatacca

SEQ ID NO: 13061 - RNA, 21 nt, synthetic construct
  source 1..21: mol_type = other RNA
agtaatcgcaactagatgtag

SEQ ID NO: 13062 - RNA, 21 nt, synthetic construct
  source 1..21: mol_type = other RNA
agtagaaaacaccaaatcttt

SEQ ID NO: 13063 - RNA, 21 nt, synthetic construct
  source 1..21: mol_type = other RNA
agtatatcttctctaggccca

SEQ ID NO: 13064 - RNA, 21 nt, synthetic construct
  source 1..21: mol_type = other RNA
agtattggtatcagaaaaaga

SEQ ID NO: 13065 - RNA, 21 nt, synthetic construct
  source 1..21: mol_type = other RNA
agtcttccaactcaattcgta

SEQ ID NO: 13066 - RNA, 21 nt, synthetic construct
  source 1..21: mol_type = other RNA
agtgaagcaatctaattatgt

SEQ ID NO: 13067 - RNA, 21 nt, synthetic construct
  source 1..21: mol_type = other RNA
agtgtccttttgctttgtgat

SEQ ID NO: 13068 - RNA, 21 nt, synthetic construct
  source 1..21: mol_type = other RNA
agttgaagtgtccttttgctt

SEQ ID NO: 13069 - RNA, 21 nt, synthetic construct
  source 1..21: mol_type = other RNA
agttgcgattactggcaatgt

SEQ ID NO: 13070 - RNA, 21 nt, synthetic construct
  source 1..21: mol_type = other RNA
agttggaagactggaaagaca

SEQ ID NO: 13071 - RNA, 21 nt, synthetic construct
  source 1..21: mol_type = other RNA
agttggtttcgtgatttccca

SEQ ID NO: 13072 - RNA, 21 nt, synthetic construct
  source 1..21: mol_type = other RNA
ataaagtattggtatcagaaa

SEQ ID NO: 13073 - RNA, 21 nt, synthetic construct
  source 1..21: mol_type = other RNA
ataaccctctggacagttgaa

SEQ ID NO: 13074 - RNA, 21 nt, synthetic construct
  source 1..21: mol_type = other RNA
ataatgtttgttgtctttcca

SEQ ID NO: 13075 - RNA, 21 nt, synthetic construct
  source 1..21: mol_type = other RNA
ataattagattgcttcactat

SEQ ID NO: 13076 - RNA, 21 nt, synthetic construct
  source 1..21: mol_type = other RNA
atacctgaataaccctctgga

SEQ ID NO: 13077 - RNA, 21 nt, synthetic construct
  source 1..21: mol_type = other RNA
atacgctacatctagttgcga

SEQ ID NO: 13078 - RNA, 21 nt, synthetic construct
  source 1..21: mol_type = other RNA
atactccatagtgaagcaatc

SEQ ID NO: 13079 - RNA, 21 nt, synthetic construct
  source 1..21: mol_type = other RNA
atagtgaagcaatctaattat

SEQ ID NO: 13080 - RNA, 21 nt, synthetic construct
  source 1..21: mol_type = other RNA
atagttggtttcgtgatttcc

SEQ ID NO: 13081 - RNA, 21 nt, synthetic construct
  source 1..21: mol_type = other RNA
atataatgtttgttgtctttc

SEQ ID NO: 13082 - RNA, 21 nt, synthetic construct
  source 1..21: mol_type = other RNA
atatactccatagtgaagcaa

SEQ ID NO: 13083 - RNA, 21 nt, synthetic construct
  source 1..21: mol_type = other RNA
atatcttctctaggcccaacc

SEQ ID NO: 13084 - RNA, 21 nt, synthetic construct
  source 1..21: mol_type = other RNA
atattctttttacttgggaaa

SEQ ID NO: 13085 - RNA, 21 nt, synthetic construct
  source 1..21: mol_type = other RNA
atcacaaagcaaaaggacact

SEQ ID NO: 13086 - RNA, 21 nt, synthetic construct
  source 1..21: mol_type = other RNA
atcacgaaaccaactatacgc

SEQ ID NO: 13087 - RNA, 21 nt, synthetic construct
  source 1..21: mol_type = other RNA
atcagaaaaagatacctgaat

SEQ ID NO: 13088 - RNA, 21 nt, synthetic construct
  source 1..21: mol_type = other RNA
atcccaagtagaaaacaccaa

SEQ ID NO: 13089 - RNA, 21 nt, synthetic construct
  source 1..21: mol_type = other RNA
atcccggaaaacaaagatttg

SEQ ID NO: 13090 - RNA, 21 nt, synthetic construct
  source 1..21: mol_type = other RNA
atcgcaactagatgtagcgta

SEQ ID NO: 13091 - RNA, 21 nt, synthetic construct
  source 1..21: mol_type = other RNA
atctagttgcgattactggca

SEQ ID NO: 13092 - RNA, 21 nt, synthetic construct
  source 1..21: mol_type = other RNA
atcttctctaggcccaaccaa

SEQ ID NO: 13093 - RNA, 21 nt, synthetic construct
  source 1..21: mol_type = other RNA
atctttgttttccgggattgc

SEQ ID NO: 13094 - RNA, 21 nt, synthetic construct
  source 1..21: mol_type = other RNA
atgcaatcccggaaaacaaag

SEQ ID NO: 13095 - RNA, 21 nt, synthetic construct
  source 1..21: mol_type = other RNA
atggagtatatcttctctagg

SEQ ID NO: 13096 - RNA, 21 nt, synthetic construct
  source 1..21: mol_type = other RNA
atgtagcgtatagttggtttc

SEQ ID NO: 13097 - RNA, 21 nt, synthetic construct
  source 1..21: mol_type = other RNA
atgtccccaatgcaatcccgg

SEQ ID NO: 13098 - RNA, 21 nt, synthetic construct
  source 1..21: mol_type = other RNA
atgtttgttgtctttccagtc

SEQ ID NO: 13099 - RNA, 21 nt, synthetic construct
  source 1..21: mol_type = other RNA
atgttttacgaattgagttgg

SEQ ID NO: 13100 - RNA, 21 nt, synthetic construct
  source 1..21: mol_type = other RNA
attactggcaatgtccccaat

SEQ ID NO: 13101 - RNA, 21 nt, synthetic construct
  source 1..21: mol_type = other RNA
attagattgcttcactatgga

SEQ ID NO: 13102 - RNA, 21 nt, synthetic construct
  source 1..21: mol_type = other RNA
attatgttttacgaattgagt

SEQ ID NO: 13103 - RNA, 21 nt, synthetic construct
  source 1..21: mol_type = other RNA
attcaggtatctttttctgat

SEQ ID NO: 13104 - RNA, 21 nt, synthetic construct
  source 1..21: mol_type = other RNA
attctcctgaaaagaaaagtt

SEQ ID NO: 13105 - RNA, 21 nt, synthetic construct
  source 1..21: mol_type = other RNA
attctttttacttgggaaatc

SEQ ID NO: 13106 - RNA, 21 nt, synthetic construct
  source 1..21: mol_type = other RNA
attgagttggaagactggaaa

SEQ ID NO: 13107 - RNA, 21 nt, synthetic construct
  source 1..21: mol_type = other RNA
attgcattggggacattgcca

SEQ ID NO: 13108 - RNA, 21 nt, synthetic construct
  source 1..21: mol_type = other RNA
attgccagtaatcgcaactag

SEQ ID NO: 13109 - RNA, 21 nt, synthetic construct
  source 1..21: mol_type = other RNA
attgcttcactatggagtata

SEQ ID NO: 13110 - RNA, 21 nt, synthetic construct
  source 1..21: mol_type = other RNA
attggggacattgccagtaat

SEQ ID NO: 13111 - RNA, 21 nt, synthetic construct
  source 1..21: mol_type = other RNA
attggtatcagaaaaagatac

SEQ ID NO: 13112 - RNA, 21 nt, synthetic construct
  source 1..21: mol_type = other RNA
atttcccaagtaaaaagaata

SEQ ID NO: 13113 - RNA, 21 nt, synthetic construct
  source 1..21: mol_type = other RNA
atttggtgttttctacttggg

SEQ ID NO: 13114 - RNA, 21 nt, synthetic construct
  source 1..21: mol_type = other RNA
attttggttgggcctagagaa

SEQ ID NO: 13115 - RNA, 21 nt, synthetic construct
  source 1..21: mol_type = other RNA
caaaaggacacttcaactgtc

SEQ ID NO: 13116 - RNA, 21 nt, synthetic construct
  source 1..21: mol_type = other RNA
caaaattctcctgaaaagaaa

SEQ ID NO: 13117 - RNA, 21 nt, synthetic construct
  source 1..21: mol_type = other RNA
caaagatttggtgttttctac

SEQ ID NO: 13118 - RNA, 21 nt, synthetic construct
  source 1..21: mol_type = other RNA
caaagcaaaaggacacttcaa

SEQ ID NO: 13119 - RNA, 21 nt, synthetic construct
  source 1..21: mol_type = other RNA
caaatctttgttttccgggat

SEQ ID NO: 13120 - RNA, 21 nt, synthetic construct
  source 1..21: mol_type = other RNA
caaccaaaattctcctgaaaa

SEQ ID NO: 13121 - RNA, 21 nt, synthetic construct
  source 1..21: mol_type = other RNA
caactagatgtagcgtatagt

SEQ ID NO: 13122 - RNA, 21 nt, synthetic construct
  source 1..21: mol_type = other RNA
caactatacgctacatctagt

SEQ ID NO: 13123 - RNA, 21 nt, synthetic construct
  source 1..21: mol_type = other RNA
caactcaattcgtaaaacata

SEQ ID NO: 13124 - RNA, 21 nt, synthetic construct
  source 1..21: mol_type = other RNA
caactgtccagagggttattc

SEQ ID NO: 13125 - RNA, 21 nt, synthetic construct
  source 1..21: mol_type = other RNA
caagtagaaaacaccaaatct

SEQ ID NO: 13126 - RNA, 21 nt, synthetic construct
  source 1..21: mol_type = other RNA
caatataatgtttgttgtctt

SEQ ID NO: 13127 - RNA, 21 nt, synthetic construct
  source 1..21: mol_type = other RNA
caatcccggaaaacaaagatt

SEQ ID NO: 13128 - RNA, 21 nt, synthetic construct
  source 1..21: mol_type = other RNA
caatctaattatgttttacga

SEQ ID NO: 13129 - RNA, 21 nt, synthetic construct
  source 1..21: mol_type = other RNA
caatgcaatcccggaaaacaa

SEQ ID NO: 13130 - RNA, 21 nt, synthetic construct
  source 1..21: mol_type = other RNA
caatgtccccaatgcaatccc

SEQ ID NO: 13131 - RNA, 21 nt, synthetic construct
  source 1..21: mol_type = other RNA
caattcgtaaaacataattag

SEQ ID NO: 13132 - RNA, 21 nt, synthetic construct
  source 1..21: mol_type = other RNA
cacaaagcaaaaggacacttc

SEQ ID NO: 13133 - RNA, 21 nt, synthetic construct
  source 1..21: mol_type = other RNA
cacagatttttaaaacttttc

SEQ ID NO: 13134 - RNA, 21 nt, synthetic construct
  source 1..21: mol_type = other RNA
caccaaatctttgttttccgg

SEQ ID NO: 13135 - RNA, 21 nt, synthetic construct
  source 1..21: mol_type = other RNA
cacgaaaccaactatacgcta

SEQ ID NO: 13136 - RNA, 21 nt, synthetic construct
  source 1..21: mol_type = other RNA
cactatggagtatatcttctc

SEQ ID NO: 13137 - RNA, 21 nt, synthetic construct
  source 1..21: mol_type = other RNA
cacttcaactgtccagagggt

SEQ ID NO: 13138 - RNA, 21 nt, synthetic construct
  source 1..21: mol_type = other RNA
cagaaaaagatacctgaataa

SEQ ID NO: 13139 - RNA, 21 nt, synthetic construct
  source 1..21: mol_type = other RNA
cagagggttattcaggtatct

SEQ ID NO: 13140 - RNA, 21 nt, synthetic construct
  source 1..21: mol_type = other RNA
caggagaattttggttgggcc

SEQ ID NO: 13141 - RNA, 21 nt, synthetic construct
  source 1..21: mol_type = other RNA
caggtatctttttctgatacc

SEQ ID NO: 13142 - RNA, 21 nt, synthetic construct
  source 1..21: mol_type = other RNA
cagtaatcgcaactagatgta

SEQ ID NO: 13143 - RNA, 21 nt, synthetic construct
  source 1..21: mol_type = other RNA
cagtcttccaactcaattcgt

SEQ ID NO: 13144 - RNA, 21 nt, synthetic construct
  source 1..21: mol_type = other RNA
cagttgaagtgtccttttgct

SEQ ID NO: 13145 - RNA, 21 nt, synthetic construct
  source 1..21: mol_type = other RNA
cataattagattgcttcacta

SEQ ID NO: 13146 - RNA, 21 nt, synthetic construct
  source 1..21: mol_type = other RNA
catagtgaagcaatctaatta

SEQ ID NO: 13147 - RNA, 21 nt, synthetic construct
  source 1..21: mol_type = other RNA
catctagttgcgattactggc

SEQ ID NO: 13148 - RNA, 21 nt, synthetic construct
  source 1..21: mol_type = other RNA
cattgccagtaatcgcaacta

SEQ ID NO: 13149 - RNA, 21 nt, synthetic construct
  source 1..21: mol_type = other RNA
cattggggacattgccagtaa

SEQ ID NO: 13150 - RNA, 21 nt, synthetic construct
  source 1..21: mol_type = other RNA
ccaaaattctcctgaaaagaa

SEQ ID NO: 13151 - RNA, 21 nt, synthetic construct
  source 1..21: mol_type = other RNA
ccaaatctttgttttccggga

SEQ ID NO: 13152 - RNA, 21 nt, synthetic construct
  source 1..21: mol_type = other RNA
ccaaccaaaattctcctgaaa

SEQ ID NO: 13153 - RNA, 21 nt, synthetic construct
  source 1..21: mol_type = other RNA
ccaactatacgctacatctag

SEQ ID NO: 13154 - RNA, 21 nt, synthetic construct
  source 1..21: mol_type = other RNA
ccaactcaattcgtaaaacat

SEQ ID NO: 13155 - RNA, 21 nt, synthetic construct
  source 1..21: mol_type = other RNA
ccaagtaaaaagaatattcaa

SEQ ID NO: 13156 - RNA, 21 nt, synthetic construct
  source 1..21: mol_type = other RNA
ccaagtagaaaacaccaaatc

SEQ ID NO: 13157 - RNA, 21 nt, synthetic construct
  source 1..21: mol_type = other RNA
ccaatgcaatcccggaaaaca

SEQ ID NO: 13158 - RNA, 21 nt, synthetic construct
  source 1..21: mol_type = other RNA
ccagagggttattcaggtatc

SEQ ID NO: 13159 - RNA, 21 nt, synthetic construct
  source 1..21: mol_type = other RNA
ccagtaatcgcaactagatgt

SEQ ID NO: 13160 - RNA, 21 nt, synthetic construct
  source 1..21: mol_type = other RNA
ccagtcttccaactcaattcg

SEQ ID NO: 13161 - RNA, 21 nt, synthetic construct
  source 1..21: mol_type = other RNA
ccatagtgaagcaatctaatt

SEQ ID NO: 13162 - RNA, 21 nt, synthetic construct
  source 1..21: mol_type = other RNA
cccaaccaaaattctcctgaa

SEQ ID NO: 13163 - RNA, 21 nt, synthetic construct
  source 1..21: mol_type = other RNA
cccaagtaaaaagaatattca

SEQ ID NO: 13164 - RNA, 21 nt, synthetic construct
  source 1..21: mol_type = other RNA
cccaagtagaaaacaccaaat

SEQ ID NO: 13165 - RNA, 21 nt, synthetic construct
  source 1..21: mol_type = other RNA
cccaatgcaatcccggaaaac

SEQ ID NO: 13166 - RNA, 21 nt, synthetic construct
  source 1..21: mol_type = other RNA
ccccaatgcaatcccggaaaa

SEQ ID NO: 13167 - RNA, 21 nt, synthetic construct
  source 1..21: mol_type = other RNA
cccggaaaacaaagatttggt

SEQ ID NO: 13168 - RNA, 21 nt, synthetic construct
  source 1..21: mol_type = other RNA
ccctctggacagttgaagtgt

SEQ ID NO: 13169 - RNA, 21 nt, synthetic construct
  source 1..21: mol_type = other RNA
ccggaaaacaaagatttggtg

SEQ ID NO: 13170 - RNA, 21 nt, synthetic construct
  source 1..21: mol_type = other RNA
ccgggattgcattggggacat

SEQ ID NO: 13171 - RNA, 21 nt, synthetic construct
  source 1..21: mol_type = other RNA
cctagagaagatatactccat

SEQ ID NO: 13172 - RNA, 21 nt, synthetic construct
  source 1..21: mol_type = other RNA
cctctggacagttgaagtgtc

SEQ ID NO: 13173 - RNA, 21 nt, synthetic construct
  source 1..21: mol_type = other RNA
cctgaaaagaaaagttttaaa

SEQ ID NO: 13174 - RNA, 21 nt, synthetic construct
  source 1..21: mol_type = other RNA
cctgaataaccctctggacag

SEQ ID NO: 13175 - RNA, 21 nt, synthetic construct
  source 1..21: mol_type = other RNA
ccttttgctttgtgatcccaa

SEQ ID NO: 13176 - RNA, 21 nt, synthetic construct
  source 1..21: mol_type = other RNA
cgaaaccaactatacgctaca

SEQ ID NO: 13177 - RNA, 21 nt, synthetic construct
  source 1..21: mol_type = other RNA
cgaattgagttggaagactgg

SEQ ID NO: 13178 - RNA, 21 nt, synthetic construct
  source 1..21: mol_type = other RNA
cgattactggcaatgtcccca

SEQ ID NO: 13179 - RNA, 21 nt, synthetic construct
  source 1..21: mol_type = other RNA
cgcaactagatgtagcgtata

SEQ ID NO: 13180 - RNA, 21 nt, synthetic construct
  source 1..21: mol_type = other RNA
cgctacatctagttgcgatta

SEQ ID NO: 13181 - RNA, 21 nt, synthetic construct
  source 1..21: mol_type = other RNA
cggaaaacaaagatttggtgt

SEQ ID NO: 13182 - RNA, 21 nt, synthetic construct
  source 1..21: mol_type = other RNA
cgggattgcattggggacatt

SEQ ID NO: 13183 - RNA, 21 nt, synthetic construct
  source 1..21: mol_type = other RNA
cgtaaaacataattagattgc

SEQ ID NO: 13184 - RNA, 21 nt, synthetic construct
  source 1..21: mol_type = other RNA
cgtatagttggtttcgtgatt

SEQ ID NO: 13185 - RNA, 21 nt, synthetic construct
  source 1..21: mol_type = other RNA
cgtgatttcccaagtaaaaag

SEQ ID NO: 13186 - RNA, 21 nt, synthetic construct
  source 1..21: mol_type = other RNA
ctaattatgttttacgaattg

SEQ ID NO: 13187 - RNA, 21 nt, synthetic construct
  source 1..21: mol_type = other RNA
ctacatctagttgcgattact

SEQ ID NO: 13188 - RNA, 21 nt, synthetic construct
  source 1..21: mol_type = other RNA
ctacttgggatcacaaagcaa

SEQ ID NO: 13189 - RNA, 21 nt, synthetic construct
  source 1..21: mol_type = other RNA
ctagagaagatatactccata

SEQ ID NO: 13190 - RNA, 21 nt, synthetic construct
  source 1..21: mol_type = other RNA
ctagatgtagcgtatagttgg

SEQ ID NO: 13191 - RNA, 21 nt, synthetic construct
  source 1..21: mol_type = other RNA
ctaggcccaaccaaaattctc

SEQ ID NO: 13192 - RNA, 21 nt, synthetic construct
  source 1..21: mol_type = other RNA
ctagttgcgattactggcaat

SEQ ID NO: 13193 - RNA, 21 nt, synthetic construct
  source 1..21: mol_type = other RNA
ctatacgctacatctagttgc

SEQ ID NO: 13194 - RNA, 21 nt, synthetic construct
  source 1..21: mol_type = other RNA
ctatggagtatatcttctcta

SEQ ID NO: 13195 - RNA, 21 nt, synthetic construct
  source 1..21: mol_type = other RNA
ctcaattcgtaaaacataatt

SEQ ID NO: 13196 - RNA, 21 nt, synthetic construct
  source 1..21: mol_type = other RNA
ctcacagatttttaaaacttt

SEQ ID NO: 13197 - RNA, 21 nt, synthetic construct
  source 1..21: mol_type = other RNA
ctccatagtgaagcaatctaa

SEQ ID NO: 13198 - RNA, 21 nt, synthetic construct
  source 1..21: mol_type = other RNA
ctcctgaaaagaaaagtttta

SEQ ID NO: 13199 - RNA, 21 nt, synthetic construct
  source 1..21: mol_type = other RNA
ctctaggcccaaccaaaattc

SEQ ID NO: 13200 - RNA, 21 nt, synthetic construct
  source 1..21: mol_type = other RNA
ctctggacagttgaagtgtcc

SEQ ID NO: 13201 - RNA, 21 nt, synthetic construct
  source 1..21: mol_type = other RNA
ctgaataaccctctggacagt

SEQ ID NO: 13202 - RNA, 21 nt, synthetic construct
  source 1..21: mol_type = other RNA
ctggaaagacaacaaacatta

SEQ ID NO: 13203 - RNA, 21 nt, synthetic construct
  source 1..21: mol_type = other RNA
ctggacagttgaagtgtcctt

SEQ ID NO: 13204 - RNA, 21 nt, synthetic construct
  source 1..21: mol_type = other RNA
ctggcaatgtccccaatgcaa

SEQ ID NO: 13205 - RNA, 21 nt, synthetic construct
  source 1..21: mol_type = other RNA
ctgtccagagggttattcagg

SEQ ID NO: 13206 - RNA, 21 nt, synthetic construct
  source 1..21: mol_type = other RNA
cttcaactgtccagagggtta

SEQ ID NO: 13207 - RNA, 21 nt, synthetic construct
  source 1..21: mol_type = other RNA
cttcactatggagtatatctt

SEQ ID NO: 13208 - RNA, 21 nt, synthetic construct
  source 1..21: mol_type = other RNA
cttccaactcaattcgtaaaa

SEQ ID NO: 13209 - RNA, 21 nt, synthetic construct
  source 1..21: mol_type = other RNA
cttctctaggcccaaccaaaa

SEQ ID NO: 13210 - RNA, 21 nt, synthetic construct
  source 1..21: mol_type = other RNA
cttgggaaatcacgaaaccaa

SEQ ID NO: 13211 - RNA, 21 nt, synthetic construct
  source 1..21: mol_type = other RNA
cttgggatcacaaagcaaaag

SEQ ID NO: 13212 - RNA, 21 nt, synthetic construct
  source 1..21: mol_type = other RNA
ctttccagtcttccaactcaa

SEQ ID NO: 13213 - RNA, 21 nt, synthetic construct
  source 1..21: mol_type = other RNA
ctttgtgatcccaagtagaaa

SEQ ID NO: 13214 - RNA, 21 nt, synthetic construct
  source 1..21: mol_type = other RNA
ctttgttttccgggattgcat

SEQ ID NO: 13215 - RNA, 21 nt, synthetic construct
  source 1..21: mol_type = other RNA
cttttcaggagaattttggtt

SEQ ID NO: 13216 - RNA, 21 nt, synthetic construct
  source 1..21: mol_type = other RNA
cttttcttttcaggagaattt

SEQ ID NO: 13217 - RNA, 21 nt, synthetic construct
  source 1..21: mol_type = other RNA
cttttgctttgtgatcccaag

SEQ ID NO: 13218 - RNA, 21 nt, synthetic construct
  source 1..21: mol_type = other RNA
ctttttacttgggaaatcacg

SEQ ID NO: 13219 - RNA, 21 nt, synthetic construct
  source 1..21: mol_type = other RNA
gaaaaagatacctgaataacc

SEQ ID NO: 13220 - RNA, 21 nt, synthetic construct
  source 1..21: mol_type = other RNA
gaaaacaaagatttggtgttt

SEQ ID NO: 13221 - RNA, 21 nt, synthetic construct
  source 1..21: mol_type = other RNA
gaaaacaccaaatctttgttt

SEQ ID NO: 13222 - RNA, 21 nt, synthetic construct
  source 1..21: mol_type = other RNA
gaaaccaactatacgctacat

SEQ ID NO: 13223 - RNA, 21 nt, synthetic construct
  source 1..21: mol_type = other RNA
gaaagacaacaaacattatat

SEQ ID NO: 13224 - RNA, 21 nt, synthetic construct
  source 1..21: mol_type = other RNA
gaaatcacgaaaccaactata

SEQ ID NO: 13225 - RNA, 21 nt, synthetic construct
  source 1..21: mol_type = other RNA
gaagactggaaagacaacaaa

SEQ ID NO: 13226 - RNA, 21 nt, synthetic construct
  source 1..21: mol_type = other RNA
gaagatatactccatagtgaa

SEQ ID NO: 13227 - RNA, 21 nt, synthetic construct
  source 1..21: mol_type = other RNA
gaagcaatctaattatgtttt

SEQ ID NO: 13228 - RNA, 21 nt, synthetic construct
  source 1..21: mol_type = other RNA
gaagtgtccttttgctttgtg

SEQ ID NO: 13229 - RNA, 21 nt, synthetic construct
  source 1..21: mol_type = other RNA
gaataaccctctggacagttg

SEQ ID NO: 13230 - RNA, 21 nt, synthetic construct
  source 1..21: mol_type = other RNA
gaatattctttttacttggga

SEQ ID NO: 13231 - RNA, 21 nt, synthetic construct
  source 1..21: mol_type = other RNA
gaattgagttggaagactgga

SEQ ID NO: 13232 - RNA, 21 nt, synthetic construct
  source 1..21: mol_type = other RNA
gaattttggttgggcctagag

SEQ ID NO: 13233 - RNA, 21 nt, synthetic construct
  source 1..21: mol_type = other RNA
gacaacaaacattatattgaa

SEQ ID NO: 13234 - RNA, 21 nt, synthetic construct
  source 1..21: mol_type = other RNA
gacacttcaactgtccagagg

SEQ ID NO: 13235 - RNA, 21 nt, synthetic construct
  source 1..21: mol_type = other RNA
gacagttgaagtgtccttttg

SEQ ID NO: 13236 - RNA, 21 nt, synthetic construct
  source 1..21: mol_type = other RNA
gacattgccagtaatcgcaac

SEQ ID NO: 13237 - RNA, 21 nt, synthetic construct
  source 1..21: mol_type = other RNA
gactggaaagacaacaaacat

SEQ ID NO: 13238 - RNA, 21 nt, synthetic construct
  source 1..21: mol_type = other RNA
gagaagatatactccatagtg

SEQ ID NO: 13239 - RNA, 21 nt, synthetic construct
  source 1..21: mol_type = other RNA
gagaattttggttgggcctag

SEQ ID NO: 13240 - RNA, 21 nt, synthetic construct
  source 1..21: mol_type = other RNA
gagggttattcaggtatcttt

SEQ ID NO: 13241 - RNA, 21 nt, synthetic construct
  source 1..21: mol_type = other RNA
gagtatatcttctctaggccc

SEQ ID NO: 13242 - RNA, 21 nt, synthetic construct
  source 1..21: mol_type = other RNA
gagttggaagactggaaagac

SEQ ID NO: 13243 - RNA, 21 nt, synthetic construct
  source 1..21: mol_type = other RNA
gatacctgaataaccctctgg

SEQ ID NO: 13244 - RNA, 21 nt, synthetic construct
  source 1..21: mol_type = other RNA
gatatactccatagtgaagca

SEQ ID NO: 13245 - RNA, 21 nt, synthetic construct
  source 1..21: mol_type = other RNA
gatcacaaagcaaaaggacac

SEQ ID NO: 13246 - RNA, 21 nt, synthetic construct
  source 1..21: mol_type = other RNA
gatcccaagtagaaaacacca

SEQ ID NO: 13247 - RNA, 21 nt, synthetic construct
  source 1..21: mol_type = other RNA
gatgtagcgtatagttggttt

SEQ ID NO: 13248 - RNA, 21 nt, synthetic construct
  source 1..21: mol_type = other RNA
gattactggcaatgtccccaa

SEQ ID NO: 13249 - RNA, 21 nt, synthetic construct
  source 1..21: mol_type = other RNA
gattgcattggggacattgcc

SEQ ID NO: 13250 - RNA, 21 nt, synthetic construct
  source 1..21: mol_type = other RNA
gattgcttcactatggagtat

SEQ ID NO: 13251 - RNA, 21 nt, synthetic construct
  source 1..21: mol_type = other RNA
gatttcccaagtaaaaagaat

SEQ ID NO: 13252 - RNA, 21 nt, synthetic construct
  source 1..21: mol_type = other RNA
gatttggtgttttctacttgg

SEQ ID NO: 13253 - RNA, 21 nt, synthetic construct
  source 1..21: mol_type = other RNA
gcaaaaggacacttcaactgt

SEQ ID NO: 13254 - RNA, 21 nt, synthetic construct
  source 1..21: mol_type = other RNA
gcaactagatgtagcgtatag

SEQ ID NO: 13255 - RNA, 21 nt, synthetic construct
  source 1..21: mol_type = other RNA
gcaatcccggaaaacaaagat

SEQ ID NO: 13256 - RNA, 21 nt, synthetic construct
  source 1..21: mol_type = other RNA
gcaatctaattatgttttacg

SEQ ID NO: 13257 - RNA, 21 nt, synthetic construct
  source 1..21: mol_type = other RNA
gcaatgtccccaatgcaatcc

SEQ ID NO: 13258 - RNA, 21 nt, synthetic construct
  source 1..21: mol_type = other RNA
gcattggggacattgccagta

SEQ ID NO: 13259 - RNA, 21 nt, synthetic construct
  source 1..21: mol_type = other RNA
gccagtaatcgcaactagatg

SEQ ID NO: 13260 - RNA, 21 nt, synthetic construct
  source 1..21: mol_type = other RNA
gcccaaccaaaattctcctga

SEQ ID NO: 13261 - RNA, 21 nt, synthetic construct
  source 1..21: mol_type = other RNA
gcctagagaagatatactcca

SEQ ID NO: 13262 - RNA, 21 nt, synthetic construct
  source 1..21: mol_type = other RNA
gcgattactggcaatgtcccc

SEQ ID NO: 13263 - RNA, 21 nt, synthetic construct
  source 1..21: mol_type = other RNA
gcgtatagttggtttcgtgat

SEQ ID NO: 13264 - RNA, 21 nt, synthetic construct
  source 1..21: mol_type = other RNA
gctacatctagttgcgattac

SEQ ID NO: 13265 - RNA, 21 nt, synthetic construct
  source 1..21: mol_type = other RNA
gcttcactatggagtatatct

SEQ ID NO: 13266 - RNA, 21 nt, synthetic construct
  source 1..21: mol_type = other RNA
gctttgtgatcccaagtagaa

SEQ ID NO: 13267 - RNA, 21 nt, synthetic construct
  source 1..21: mol_type = other RNA
ggaaaacaaagatttggtgtt

SEQ ID NO: 13268 - RNA, 21 nt, synthetic construct
  source 1..21: mol_type = other RNA
ggaaagacaacaaacattata

SEQ ID NO: 13269 - RNA, 21 nt, synthetic construct
  source 1..21: mol_type = other RNA
ggaaatcacgaaaccaactat

SEQ ID NO: 13270 - RNA, 21 nt, synthetic construct
  source 1..21: mol_type = other RNA
ggaagactggaaagacaacaa

SEQ ID NO: 13271 - RNA, 21 nt, synthetic construct
  source 1..21: mol_type = other RNA
ggacacttcaactgtccagag

SEQ ID NO: 13272 - RNA, 21 nt, synthetic construct
  source 1..21: mol_type = other RNA
ggacagttgaagtgtcctttt

SEQ ID NO: 13273 - RNA, 21 nt, synthetic construct
  source 1..21: mol_type = other RNA
ggacattgccagtaatcgcaa

SEQ ID NO: 13274 - RNA, 21 nt, synthetic construct
  source 1..21: mol_type = other RNA
ggagaattttggttgggccta

SEQ ID NO: 13275 - RNA, 21 nt, synthetic construct
  source 1..21: mol_type = other RNA
ggagtatatcttctctaggcc

SEQ ID NO: 13276 - RNA, 21 nt, synthetic construct
  source 1..21: mol_type = other RNA
ggatcacaaagcaaaaggaca

SEQ ID NO: 13277 - RNA, 21 nt, synthetic construct
  source 1..21: mol_type = other RNA
ggattgcattggggacattgc

SEQ ID NO: 13278 - RNA, 21 nt, synthetic construct
  source 1..21: mol_type = other RNA
ggcaatgtccccaatgcaatc

SEQ ID NO: 13279 - RNA, 21 nt, synthetic construct
  source 1..21: mol_type = other RNA
ggcccaaccaaaattctcctg

SEQ ID NO: 13280 - RNA, 21 nt, synthetic construct
  source 1..21: mol_type = other RNA
ggcctagagaagatatactcc

SEQ ID NO: 13281 - RNA, 21 nt, synthetic construct
  source 1..21: mol_type = other RNA
gggaaatcacgaaaccaacta

SEQ ID NO: 13282 - RNA, 21 nt, synthetic construct
  source 1..21: mol_type = other RNA
gggacattgccagtaatcgca

SEQ ID NO: 13283 - RNA, 21 nt, synthetic construct
  source 1..21: mol_type = other RNA
gggatcacaaagcaaaaggac

SEQ ID NO: 13284 - RNA, 21 nt, synthetic construct
  source 1..21: mol_type = other RNA
gggattgcattggggacattg

SEQ ID NO: 13285 - RNA, 21 nt, synthetic construct
  source 1..21: mol_type = other RNA
gggcctagagaagatatactc

SEQ ID NO: 13286 - RNA, 21 nt, synthetic construct
  source 1..21: mol_type = other RNA
ggggacattgccagtaatcgc

SEQ ID NO: 13287 - RNA, 21 nt, synthetic construct
  source 1..21: mol_type = other RNA
gggttattcaggtatcttttt

SEQ ID NO: 13288 - RNA, 21 nt, synthetic construct
  source 1..21: mol_type = other RNA
ggtatcagaaaaagatacctg

SEQ ID NO: 13289 - RNA, 21 nt, synthetic construct
  source 1..21: mol_type = other RNA
ggtatctttttctgataccaa

SEQ ID NO: 13290 - RNA, 21 nt, synthetic construct
  source 1..21: mol_type = other RNA
ggtgttttctacttgggatca

SEQ ID NO: 13291 - RNA, 21 nt, synthetic construct
  source 1..21: mol_type = other RNA
ggttattcaggtatctttttc

SEQ ID NO: 13292 - RNA, 21 nt, synthetic construct
  source 1..21: mol_type = other RNA
ggttgggcctagagaagatat

SEQ ID NO: 13293 - RNA, 21 nt, synthetic construct
  source 1..21: mol_type = other RNA
ggtttcgtgatttcccaagta

SEQ ID NO: 13294 - RNA, 21 nt, synthetic construct
  source 1..21: mol_type = other RNA
gtaaaacataattagattgct

SEQ ID NO: 13295 - RNA, 21 nt, synthetic construct
  source 1..21: mol_type = other RNA
gtaatcgcaactagatgtagc

SEQ ID NO: 13296 - RNA, 21 nt, synthetic construct
  source 1..21: mol_type = other RNA
gtagaaaacaccaaatctttg

SEQ ID NO: 13297 - RNA, 21 nt, synthetic construct
  source 1..21: mol_type = other RNA
gtagcgtatagttggtttcgt

SEQ ID NO: 13298 - RNA, 21 nt, synthetic construct
  source 1..21: mol_type = other RNA
gtatagttggtttcgtgattt

SEQ ID NO: 13299 - RNA, 21 nt, synthetic construct
  source 1..21: mol_type = other RNA
gtatatcttctctaggcccaa

SEQ ID NO: 13300 - RNA, 21 nt, synthetic construct
  source 1..21: mol_type = other RNA
gtatcagaaaaagatacctga

SEQ ID NO: 13301 - RNA, 21 nt, synthetic construct
  source 1..21: mol_type = other RNA
gtatctttttctgataccaat

SEQ ID NO: 13302 - RNA, 21 nt, synthetic construct
  source 1..21: mol_type = other RNA
gtattggtatcagaaaaagat

SEQ ID NO: 13303 - RNA, 21 nt, synthetic construct
  source 1..21: mol_type = other RNA
gtccagagggttattcaggta

SEQ ID NO: 13304 - RNA, 21 nt, synthetic construct
  source 1..21: mol_type = other RNA
gtccccaatgcaatcccggaa

SEQ ID NO: 13305 - RNA, 21 nt, synthetic construct
  source 1..21: mol_type = other RNA
gtccttttgctttgtgatccc

SEQ ID NO: 13306 - RNA, 21 nt, synthetic construct
  source 1..21: mol_type = other RNA
gtcttccaactcaattcgtaa

SEQ ID NO: 13307 - RNA, 21 nt, synthetic construct
  source 1..21: mol_type = other RNA
gtctttccagtcttccaactc

SEQ ID NO: 13308 - RNA, 21 nt, synthetic construct
  source 1..21: mol_type = other RNA
gtgaagcaatctaattatgtt

SEQ ID NO: 13309 - RNA, 21 nt, synthetic construct
  source 1..21: mol_type = other RNA
gtgatcccaagtagaaaacac

SEQ ID NO: 13310 - RNA, 21 nt, synthetic construct
  source 1..21: mol_type = other RNA
gtgatttcccaagtaaaaaga

SEQ ID NO: 13311 - RNA, 21 nt, synthetic construct
  source 1..21: mol_type = other RNA
gtgtccttttgctttgtgatc

SEQ ID NO: 13312 - RNA, 21 nt, synthetic construct
  source 1..21: mol_type = other RNA
gtgttttctacttgggatcac

SEQ ID NO: 13313 - RNA, 21 nt, synthetic construct
  source 1..21: mol_type = other RNA
gttattcaggtatctttttct

SEQ ID NO: 13314 - RNA, 21 nt, synthetic construct
  source 1..21: mol_type = other RNA
gttgaagtgtccttttgcttt

SEQ ID NO: 13315 - RNA, 21 nt, synthetic construct
  source 1..21: mol_type = other RNA
gttgcgattactggcaatgtc

SEQ ID NO: 13316 - RNA, 21 nt, synthetic construct
  source 1..21: mol_type = other RNA
gttggaagactggaaagacaa

SEQ ID NO: 13317 - RNA, 21 nt, synthetic construct
  source 1..21: mol_type = other RNA
gttgggcctagagaagatata

SEQ ID NO: 13318 - RNA, 21 nt, synthetic construct
  source 1..21: mol_type = other RNA
gttggtttcgtgatttcccaa

SEQ ID NO: 13319 - RNA, 21 nt, synthetic construct
  source 1..21: mol_type = other RNA
gttgtctttccagtcttccaa

SEQ ID NO: 13320 - RNA, 21 nt, synthetic construct
  source 1..21: mol_type = other RNA
gtttcgtgatttcccaagtaa

SEQ ID NO: 13321 - RNA, 21 nt, synthetic construct
  source 1..21: mol_type = other RNA
gtttgttgtctttccagtctt

SEQ ID NO: 13322 - RNA, 21 nt, synthetic construct
  source 1..21: mol_type = other RNA
gttttacgaattgagttggaa

SEQ ID NO: 13323 - RNA, 21 nt, synthetic construct
  source 1..21: mol_type = other RNA
gttttccgggattgcattggg

SEQ ID NO: 13324 - RNA, 21 nt, synthetic construct
  source 1..21: mol_type = other RNA
gttttctacttgggatcacaa

SEQ ID NO: 13325 - RNA, 21 nt, synthetic construct
  source 1..21: mol_type = other RNA
taaaacttttcttttcaggag

SEQ ID NO: 13326 - RNA, 21 nt, synthetic construct
  source 1..21: mol_type = other RNA
taaagtattggtatcagaaaa

SEQ ID NO: 13327 - RNA, 21 nt, synthetic construct
  source 1..21: mol_type = other RNA
taaccctctggacagttgaag

SEQ ID NO: 13328 - RNA, 21 nt, synthetic construct
  source 1..21: mol_type = other RNA
taatcgcaactagatgtagcg

SEQ ID NO: 13329 - RNA, 21 nt, synthetic construct
  source 1..21: mol_type = other RNA
taatgtttgttgtctttccag

SEQ ID NO: 13330 - RNA, 21 nt, synthetic construct
  source 1..21: mol_type = other RNA
taattagattgcttcactatg

SEQ ID NO: 13331 - RNA, 21 nt, synthetic construct
  source 1..21: mol_type = other RNA
tacatctagttgcgattactg

SEQ ID NO: 13332 - RNA, 21 nt, synthetic construct
  source 1..21: mol_type = other RNA
tacctgaataaccctctggac

SEQ ID NO: 13333 - RNA, 21 nt, synthetic construct
  source 1..21: mol_type = other RNA
tacgaattgagttggaagact

SEQ ID NO: 13334 - RNA, 21 nt, synthetic construct
  source 1..21: mol_type = other RNA
tacgctacatctagttgcgat

SEQ ID NO: 13335 - RNA, 21 nt, synthetic construct
  source 1..21: mol_type = other RNA
tactccatagtgaagcaatct

SEQ ID NO: 13336 - RNA, 21 nt, synthetic construct
  source 1..21: mol_type = other RNA
tactggcaatgtccccaatgc

SEQ ID NO: 13337 - RNA, 21 nt, synthetic construct
  source 1..21: mol_type = other RNA
tacttgggaaatcacgaaacc

SEQ ID NO: 13338 - RNA, 21 nt, synthetic construct
  source 1..21: mol_type = other RNA
tacttgggatcacaaagcaaa

SEQ ID NO: 13339 - RNA, 21 nt, synthetic construct
  source 1..21: mol_type = other RNA
tagaaaacaccaaatctttgt

SEQ ID NO: 13340 - RNA, 21 nt, synthetic construct
  source 1..21: mol_type = other RNA
tagagaagatatactccatag

SEQ ID NO: 13341 - RNA, 21 nt, synthetic construct
  source 1..21: mol_type = other RNA
tagatgtagcgtatagttggt

SEQ ID NO: 13342 - RNA, 21 nt, synthetic construct
  source 1..21: mol_type = other RNA
tagattgcttcactatggagt

SEQ ID NO: 13343 - RNA, 21 nt, synthetic construct
  source 1..21: mol_type = other RNA
tagcgtatagttggtttcgtg

SEQ ID NO: 13344 - RNA, 21 nt, synthetic construct
  source 1..21: mol_type = other RNA
taggcccaaccaaaattctcc

SEQ ID NO: 13345 - RNA, 21 nt, synthetic construct
  source 1..21: mol_type = other RNA
tagtgaagcaatctaattatg

SEQ ID NO: 13346 - RNA, 21 nt, synthetic construct
  source 1..21: mol_type = other RNA
tagttgcgattactggcaatg

SEQ ID NO: 13347 - RNA, 21 nt, synthetic construct
  source 1..21: mol_type = other RNA
tagttggtttcgtgatttccc

SEQ ID NO: 13348 - RNA, 21 nt, synthetic construct
  source 1..21: mol_type = other RNA
tataatgtttgttgtctttcc

SEQ ID NO: 13349 - RNA, 21 nt, synthetic construct
  source 1..21: mol_type = other RNA
tatacgctacatctagttgcg

SEQ ID NO: 13350 - RNA, 21 nt, synthetic construct
  source 1..21: mol_type = other RNA
tatactccatagtgaagcaat

SEQ ID NO: 13351 - RNA, 21 nt, synthetic construct
  source 1..21: mol_type = other RNA
tatagttggtttcgtgatttc

SEQ ID NO: 13352 - RNA, 21 nt, synthetic construct
  source 1..21: mol_type = other RNA
tatatcttctctaggcccaac

SEQ ID NO: 13353 - RNA, 21 nt, synthetic construct
  source 1..21: mol_type = other RNA
tatcagaaaaagatacctgaa

SEQ ID NO: 13354 - RNA, 21 nt, synthetic construct
  source 1..21: mol_type = other RNA
tatcttctctaggcccaacca

SEQ ID NO: 13355 - RNA, 21 nt, synthetic construct
  source 1..21: mol_type = other RNA
tatctttttctgataccaata

SEQ ID NO: 13356 - RNA, 21 nt, synthetic construct
  source 1..21: mol_type = other RNA
tatggagtatatcttctctag

SEQ ID NO: 13357 - RNA, 21 nt, synthetic construct
  source 1..21: mol_type = other RNA
tatgttttacgaattgagttg

SEQ ID NO: 13358 - RNA, 21 nt, synthetic construct
  source 1..21: mol_type = other RNA
tattcaggtatctttttctga

SEQ ID NO: 13359 - RNA, 21 nt, synthetic construct
  source 1..21: mol_type = other RNA
tattctttttacttgggaaat

SEQ ID NO: 13360 - RNA, 21 nt, synthetic construct
  source 1..21: mol_type = other RNA
tattggtatcagaaaaagata

SEQ ID NO: 13361 - RNA, 21 nt, synthetic construct
  source 1..21: mol_type = other RNA
tcaactgtccagagggttatt

SEQ ID NO: 13362 - RNA, 21 nt, synthetic construct
  source 1..21: mol_type = other RNA
tcaatataatgtttgttgtct

SEQ ID NO: 13363 - RNA, 21 nt, synthetic construct
  source 1..21: mol_type = other RNA
tcacaaagcaaaaggacactt

SEQ ID NO: 13364 - RNA, 21 nt, synthetic construct
  source 1..21: mol_type = other RNA
tcacgaaaccaactatacgct

SEQ ID NO: 13365 - RNA, 21 nt, synthetic construct
  source 1..21: mol_type = other RNA
tcactatggagtatatcttct

SEQ ID NO: 13366 - RNA, 21 nt, synthetic construct
  source 1..21: mol_type = other RNA
tcagaaaaagatacctgaata

SEQ ID NO: 13367 - RNA, 21 nt, synthetic construct
  source 1..21: mol_type = other RNA
tcaggagaattttggttgggc

SEQ ID NO: 13368 - RNA, 21 nt, synthetic construct
  source 1..21: mol_type = other RNA
tcaggtatctttttctgatac

SEQ ID NO: 13369 - RNA, 21 nt, synthetic construct
  source 1..21: mol_type = other RNA
tccaactcaattcgtaaaaca

SEQ ID NO: 13370 - RNA, 21 nt, synthetic construct
  source 1..21: mol_type = other RNA
tccagagggttattcaggtat

SEQ ID NO: 13371 - RNA, 21 nt, synthetic construct
  source 1..21: mol_type = other RNA
tccagtcttccaactcaattc

SEQ ID NO: 13372 - RNA, 21 nt, synthetic construct
  source 1..21: mol_type = other RNA
tccatagtgaagcaatctaat

SEQ ID NO: 13373 - RNA, 21 nt, synthetic construct
  source 1..21: mol_type = other RNA
tcccaagtaaaaagaatattc

SEQ ID NO: 13374 - RNA, 21 nt, synthetic construct
  source 1..21: mol_type = other RNA
tcccaagtagaaaacaccaaa

SEQ ID NO: 13375 - RNA, 21 nt, synthetic construct
  source 1..21: mol_type = other RNA
tccccaatgcaatcccggaaa

SEQ ID NO: 13376 - RNA, 21 nt, synthetic construct
  source 1..21: mol_type = other RNA
tcccggaaaacaaagatttgg

SEQ ID NO: 13377 - RNA, 21 nt, synthetic construct
  source 1..21: mol_type = other RNA
tccgggattgcattggggaca

SEQ ID NO: 13378 - RNA, 21 nt, synthetic construct
  source 1..21: mol_type = other RNA
tcctgaaaagaaaagttttaa

SEQ ID NO: 13379 - RNA, 21 nt, synthetic construct
  source 1..21: mol_type = other RNA
tccttttgctttgtgatccca

SEQ ID NO: 13380 - RNA, 21 nt, synthetic construct
  source 1..21: mol_type = other RNA
tcgcaactagatgtagcgtat

SEQ ID NO: 13381 - RNA, 21 nt, synthetic construct
  source 1..21: mol_type = other RNA
tcgtaaaacataattagattg

SEQ ID NO: 13382 - RNA, 21 nt, synthetic construct
  source 1..21: mol_type = other RNA
tcgtgatttcccaagtaaaaa

SEQ ID NO: 13383 - RNA, 21 nt, synthetic construct
  source 1..21: mol_type = other RNA
tctacttgggatcacaaagca

SEQ ID NO: 13384 - RNA, 21 nt, synthetic construct
  source 1..21: mol_type = other RNA
tctaggcccaaccaaaattct

SEQ ID NO: 13385 - RNA, 21 nt, synthetic construct
  source 1..21: mol_type = other RNA
tctagttgcgattactggcaa

SEQ ID NO: 13386 - RNA, 21 nt, synthetic construct
  source 1..21: mol_type = other RNA
tctcctgaaaagaaaagtttt

SEQ ID NO: 13387 - RNA, 21 nt, synthetic construct
  source 1..21: mol_type = other RNA
tctctaggcccaaccaaaatt

SEQ ID NO: 13388 - RNA, 21 nt, synthetic construct
  source 1..21: mol_type = other RNA
tctggacagttgaagtgtcct

SEQ ID NO: 13389 - RNA, 21 nt, synthetic construct
  source 1..21: mol_type = other RNA
tcttccaactcaattcgtaaa

SEQ ID NO: 13390 - RNA, 21 nt, synthetic construct
  source 1..21: mol_type = other RNA
tcttctctaggcccaaccaaa

SEQ ID NO: 13391 - RNA, 21 nt, synthetic construct
  source 1..21: mol_type = other RNA
tctttccagtcttccaactca

SEQ ID NO: 13392 - RNA, 21 nt, synthetic construct
  source 1..21: mol_type = other RNA
tctttgttttccgggattgca

SEQ ID NO: 13393 - RNA, 21 nt, synthetic construct
  source 1..21: mol_type = other RNA
tcttttcaggagaattttggt

SEQ ID NO: 13394 - RNA, 21 nt, synthetic construct
  source 1..21: mol_type = other RNA
tctttttacttgggaaatcac

SEQ ID NO: 13395 - RNA, 21 nt, synthetic construct
  source 1..21: mol_type = other RNA
tgaagcaatctaattatgttt

SEQ ID NO: 13396 - RNA, 21 nt, synthetic construct
  source 1..21: mol_type = other RNA
tgaagtgtccttttgctttgt

SEQ ID NO: 13397 - RNA, 21 nt, synthetic construct
  source 1..21: mol_type = other RNA
tgaataaccctctggacagtt

SEQ ID NO: 13398 - RNA, 21 nt, synthetic construct
  source 1..21: mol_type = other RNA
tgaatattctttttacttggg

SEQ ID NO: 13399 - RNA, 21 nt, synthetic construct
  source 1..21: mol_type = other RNA
tgagttggaagactggaaaga

SEQ ID NO: 13400 - RNA, 21 nt, synthetic construct
  source 1..21: mol_type = other RNA
tgatcccaagtagaaaacacc

SEQ ID NO: 13401 - RNA, 21 nt, synthetic construct
  source 1..21: mol_type = other RNA
tgatttcccaagtaaaaagaa

SEQ ID NO: 13402 - RNA, 21 nt, synthetic construct
  source 1..21: mol_type = other RNA
tgcaatcccggaaaacaaaga

SEQ ID NO: 13403 - RNA, 21 nt, synthetic construct
  source 1..21: mol_type = other RNA
tgcattggggacattgccagt

SEQ ID NO: 13404 - RNA, 21 nt, synthetic construct
  source 1..21: mol_type = other RNA
tgccagtaatcgcaactagat

SEQ ID NO: 13405 - RNA, 21 nt, synthetic construct
  source 1..21: mol_type = other RNA
tgcgattactggcaatgtccc

SEQ ID NO: 13406 - RNA, 21 nt, synthetic construct
  source 1..21: mol_type = other RNA
tgcttcactatggagtatatc

SEQ ID NO: 13407 - RNA, 21 nt, synthetic construct
  source 1..21: mol_type = other RNA
tgctttgtgatcccaagtaga

SEQ ID NO: 13408 - RNA, 21 nt, synthetic construct
  source 1..21: mol_type = other RNA
tggaaagacaacaaacattat

SEQ ID NO: 13409 - RNA, 21 nt, synthetic construct
  source 1..21: mol_type = other RNA
tggaagactggaaagacaaca

SEQ ID NO: 13410 - RNA, 21 nt, synthetic construct
  source 1..21: mol_type = other RNA
tggacagttgaagtgtccttt

SEQ ID NO: 13411 - RNA, 21 nt, synthetic construct
  source 1..21: mol_type = other RNA
tggagtatatcttctctaggc

SEQ ID NO: 13412 - RNA, 21 nt, synthetic construct
  source 1..21: mol_type = other RNA
tggcaatgtccccaatgcaat

SEQ ID NO: 13413 - RNA, 21 nt, synthetic construct
  source 1..21: mol_type = other RNA
tgggaaatcacgaaaccaact

SEQ ID NO: 13414 - RNA, 21 nt, synthetic construct
  source 1..21: mol_type = other RNA
tgggatcacaaagcaaaagga

SEQ ID NO: 13415 - RNA, 21 nt, synthetic construct
  source 1..21: mol_type = other RNA
tgggcctagagaagatatact

SEQ ID NO: 13416 - RNA, 21 nt, synthetic construct
  source 1..21: mol_type = other RNA
tggggacattgccagtaatcg

SEQ ID NO: 13417 - RNA, 21 nt, synthetic construct
  source 1..21: mol_type = other RNA
tggtatcagaaaaagatacct

SEQ ID NO: 13418 - RNA, 21 nt, synthetic construct
  source 1..21: mol_type = other RNA
tggtgttttctacttgggatc

SEQ ID NO: 13419 - RNA, 21 nt, synthetic construct
  source 1..21: mol_type = other RNA
tggttgggcctagagaagata

SEQ ID NO: 13420 - RNA, 21 nt, synthetic construct
  source 1..21: mol_type = other RNA
tggtttcgtgatttcccaagt

SEQ ID NO: 13421 - RNA, 21 nt, synthetic construct
  source 1..21: mol_type = other RNA
tgtagcgtatagttggtttcg

SEQ ID NO: 13422 - RNA, 21 nt, synthetic construct
  source 1..21: mol_type = other RNA
tgtccagagggttattcaggt

SEQ ID NO: 13423 - RNA, 21 nt, synthetic construct
  source 1..21: mol_type = other RNA
tgtccccaatgcaatcccgga

SEQ ID NO: 13424 - RNA, 21 nt, synthetic construct
  source 1..21: mol_type = other RNA
tgtccttttgctttgtgatcc

SEQ ID NO: 13425 - RNA, 21 nt, synthetic construct
  source 1..21: mol_type = other RNA
tgtctttccagtcttccaact

SEQ ID NO: 13426 - RNA, 21 nt, synthetic construct
  source 1..21: mol_type = other RNA
tgtgatcccaagtagaaaaca

SEQ ID NO: 13427 - RNA, 21 nt, synthetic construct
  source 1..21: mol_type = other RNA
tgttgtctttccagtcttcca

SEQ ID NO: 13428 - RNA, 21 nt, synthetic construct
  source 1..21: mol_type = other RNA
tgtttgttgtctttccagtct

SEQ ID NO: 13429 - RNA, 21 nt, synthetic construct
  source 1..21: mol_type = other RNA
tgttttacgaattgagttgga

SEQ ID NO: 13430 - RNA, 21 nt, synthetic construct
  source 1..21: mol_type = other RNA
tgttttccgggattgcattgg

SEQ ID NO: 13431 - RNA, 21 nt, synthetic construct
  source 1..21: mol_type = other RNA
tgttttctacttgggatcaca

SEQ ID NO: 13432 - RNA, 21 nt, synthetic construct
  source 1..21: mol_type = other RNA
ttaaaacttttcttttcagga

SEQ ID NO: 13433 - RNA, 21 nt, synthetic construct
  source 1..21: mol_type = other RNA
ttacgaattgagttggaagac

SEQ ID NO: 13434 - RNA, 21 nt, synthetic construct
  source 1..21: mol_type = other RNA
ttactggcaatgtccccaatg

SEQ ID NO: 13435 - RNA, 21 nt, synthetic construct
  source 1..21: mol_type = other RNA
ttacttgggaaatcacgaaac

SEQ ID NO: 13436 - RNA, 21 nt, synthetic construct
  source 1..21: mol_type = other RNA
ttagattgcttcactatggag

SEQ ID NO: 13437 - RNA, 21 nt, synthetic construct
  source 1..21: mol_type = other RNA
ttatgttttacgaattgagtt

SEQ ID NO: 13438 - RNA, 21 nt, synthetic construct
  source 1..21: mol_type = other RNA
ttattcaggtatctttttctg

SEQ ID NO: 13439 - RNA, 21 nt, synthetic construct
  source 1..21: mol_type = other RNA
ttcaactgtccagagggttat

SEQ ID NO: 13440 - RNA, 21 nt, synthetic construct
  source 1..21: mol_type = other RNA
ttcaatataatgtttgttgtc

SEQ ID NO: 13441 - RNA, 21 nt, synthetic construct
  source 1..21: mol_type = other RNA
ttcactatggagtatatcttc

SEQ ID NO: 13442 - RNA, 21 nt, synthetic construct
  source 1..21: mol_type = other RNA
ttcaggagaattttggttggg

SEQ ID NO: 13443 - RNA, 21 nt, synthetic construct
  source 1..21: mol_type = other RNA
ttcaggtatctttttctgata

SEQ ID NO: 13444 - RNA, 21 nt, synthetic construct
  source 1..21: mol_type = other RNA
ttccaactcaattcgtaaaac

SEQ ID NO: 13445 - RNA, 21 nt, synthetic construct
  source 1..21: mol_type = other RNA
ttccagtcttccaactcaatt

SEQ ID NO: 13446 - RNA, 21 nt, synthetic construct
  source 1..21: mol_type = other RNA
ttcccaagtaaaaagaatatt

SEQ ID NO: 13447 - RNA, 21 nt, synthetic construct
  source 1..21: mol_type = other RNA
ttccgggattgcattggggac

SEQ ID NO: 13448 - RNA, 21 nt, synthetic construct
  source 1..21: mol_type = other RNA
ttcgtgatttcccaagtaaaa

SEQ ID NO: 13449 - RNA, 21 nt, synthetic construct
  source 1..21: mol_type = other RNA
ttctacttgggatcacaaagc

SEQ ID NO: 13450 - RNA, 21 nt, synthetic construct
  source 1..21: mol_type = other RNA
ttctcctgaaaagaaaagttt

SEQ ID NO: 13451 - RNA, 21 nt, synthetic construct
  source 1..21: mol_type = other RNA
ttctctaggcccaaccaaaat

SEQ ID NO: 13452 - RNA, 21 nt, synthetic construct
  source 1..21: mol_type = other RNA
ttcttttcaggagaattttgg

SEQ ID NO: 13453 - RNA, 21 nt, synthetic construct
  source 1..21: mol_type = other RNA
ttctttttacttgggaaatca

SEQ ID NO: 13454 - RNA, 21 nt, synthetic construct
  source 1..21: mol_type = other RNA
ttgaagtgtccttttgctttg

SEQ ID NO: 13455 - RNA, 21 nt, synthetic construct
  source 1..21: mol_type = other RNA
ttgaatattctttttacttgg

SEQ ID NO: 13456 - RNA, 21 nt, synthetic construct
  source 1..21: mol_type = other RNA
ttgagttggaagactggaaag

SEQ ID NO: 13457 - RNA, 21 nt, synthetic construct
  source 1..21: mol_type = other RNA
ttgcattggggacattgccag

SEQ ID NO: 13458 - RNA, 21 nt, synthetic construct
  source 1..21: mol_type = other RNA
ttgccagtaatcgcaactaga

SEQ ID NO: 13459 - RNA, 21 nt, synthetic construct
  source 1..21: mol_type = other RNA
ttgcgattactggcaatgtcc

SEQ ID NO: 13460 - RNA, 21 nt, synthetic construct
  source 1..21: mol_type = other RNA
ttgcttcactatggagtatat

SEQ ID NO: 13461 - RNA, 21 nt, synthetic construct
  source 1..21: mol_type = other RNA
ttgctttgtgatcccaagtag

SEQ ID NO: 13462 - RNA, 21 nt, synthetic construct
  source 1..21: mol_type = other RNA
ttggaagactggaaagacaac

SEQ ID NO: 13463 - RNA, 21 nt, synthetic construct
  source 1..21: mol_type = other RNA
ttgggaaatcacgaaaccaac

SEQ ID NO: 13464 - RNA, 21 nt, synthetic construct
  source 1..21: mol_type = other RNA
ttgggatcacaaagcaaaagg

SEQ ID NO: 13465 - RNA, 21 nt, synthetic construct
  source 1..21: mol_type = other RNA
ttgggcctagagaagatatac

SEQ ID NO: 13466 - RNA, 21 nt, synthetic construct
  source 1..21: mol_type = other RNA
ttggggacattgccagtaatc

SEQ ID NO: 13467 - RNA, 21 nt, synthetic construct
  source 1..21: mol_type = other RNA
ttggtatcagaaaaagatacc

SEQ ID NO: 13468 - RNA, 21 nt, synthetic construct
  source 1..21: mol_type = other RNA
ttggtgttttctacttgggat

SEQ ID NO: 13469 - RNA, 21 nt, synthetic construct
  source 1..21: mol_type = other RNA
ttggttgggcctagagaagat

SEQ ID NO: 13470 - RNA, 21 nt, synthetic construct
  source 1..21: mol_type = other RNA
ttggtttcgtgatttcccaag

SEQ ID NO: 13471 - RNA, 21 nt, synthetic construct
  source 1..21: mol_type = other RNA
ttgtctttccagtcttccaac

SEQ ID NO: 13472 - RNA, 21 nt, synthetic construct
  source 1..21: mol_type = other RNA
ttgtgatcccaagtagaaaac

SEQ ID NO: 13473 - RNA, 21 nt, synthetic construct
  source 1..21: mol_type = other RNA
ttgttgtctttccagtcttcc

SEQ ID NO: 13474 - RNA, 21 nt, synthetic construct
  source 1..21: mol_type = other RNA
ttgttttccgggattgcattg

SEQ ID NO: 13475 - RNA, 21 nt, synthetic construct
  source 1..21: mol_type = other RNA
tttaaaacttttcttttcagg

SEQ ID NO: 13476 - RNA, 21 nt, synthetic construct
  source 1..21: mol_type = other RNA
tttacgaattgagttggaaga

SEQ ID NO: 13477 - RNA, 21 nt, synthetic construct
  source 1..21: mol_type = other RNA
tttacttgggaaatcacgaaa

SEQ ID NO: 13478 - RNA, 21 nt, synthetic construct
  source 1..21: mol_type = other RNA
tttcaggagaattttggttgg

SEQ ID NO: 13479 - RNA, 21 nt, synthetic construct
  source 1..21: mol_type = other RNA
tttccagtcttccaactcaat

SEQ ID NO: 13480 - RNA, 21 nt, synthetic construct
  source 1..21: mol_type = other RNA
tttcccaagtaaaaagaatat

SEQ ID NO: 13481 - RNA, 21 nt, synthetic construct
  source 1..21: mol_type = other RNA
tttccgggattgcattgggga

SEQ ID NO: 13482 - RNA, 21 nt, synthetic construct
  source 1..21: mol_type = other RNA
tttcgtgatttcccaagtaaa

SEQ ID NO: 13483 - RNA, 21 nt, synthetic construct
  source 1..21: mol_type = other RNA
tttctacttgggatcacaaag

SEQ ID NO: 13484 - RNA, 21 nt, synthetic construct
  source 1..21: mol_type = other RNA
tttcttttcaggagaattttg

SEQ ID NO: 13485 - RNA, 21 nt, synthetic construct
  source 1..21: mol_type = other RNA
tttgctttgtgatcccaagta

SEQ ID NO: 13486 - RNA, 21 nt, synthetic construct
  source 1..21: mol_type = other RNA
tttggtgttttctacttggga

SEQ ID NO: 13487 - RNA, 21 nt, synthetic construct
  source 1..21: mol_type = other RNA
tttggttgggcctagagaaga

SEQ ID NO: 13488 - RNA, 21 nt, synthetic construct
  source 1..21: mol_type = other RNA
tttgtgatcccaagtagaaaa

SEQ ID NO: 13489 - RNA, 21 nt, synthetic construct
  source 1..21: mol_type = other RNA
tttgttgtctttccagtcttc

SEQ ID NO: 13490 - RNA, 21 nt, synthetic construct
  source 1..21: mol_type = other RNA
tttgttttccgggattgcatt

SEQ ID NO: 13491 - RNA, 21 nt, synthetic construct
  source 1..21: mol_type = other RNA
ttttacgaattgagttggaag

SEQ ID NO: 13492 - RNA, 21 nt, synthetic construct
  source 1..21: mol_type = other RNA
ttttacttgggaaatcacgaa

SEQ ID NO: 13493 - RNA, 21 nt, synthetic construct
  source 1..21: mol_type = other RNA
ttttcaggagaattttggttg

SEQ ID NO: 13494 - RNA, 21 nt, synthetic construct
  source 1..21: mol_type = other RNA
ttttccgggattgcattgggg

SEQ ID NO: 13495 - RNA, 21 nt, synthetic construct
  source 1..21: mol_type = other RNA
ttttctacttgggatcacaaa

SEQ ID NO: 13496 - RNA, 21 nt, synthetic construct
  source 1..21: mol_type = other RNA
ttttcttttcaggagaatttt

SEQ ID NO: 13497 - RNA, 21 nt, synthetic construct
  source 1..21: mol_type = other RNA
ttttgctttgtgatcccaagt

SEQ ID NO: 13498 - RNA, 21 nt, synthetic construct
  source 1..21: mol_type = other RNA
ttttggttgggcctagagaag

SEQ ID NO: 13499 - RNA, 21 nt, synthetic construct
  source 1..21: mol_type = other RNA
tttttacttgggaaatcacga

SEQ ID NO: 13500 - RNA, 22 nt, synthetic construct
  source 1..22: mol_type = other RNA
aaaaagatacctgaataaccct

SEQ ID NO: 13501 - RNA, 22 nt, synthetic construct
  source 1..22: mol_type = other RNA
aaaacaaagatttggtgttttc

SEQ ID NO: 13502 - RNA, 22 nt, synthetic construct
  source 1..22: mol_type = other RNA
aaaacaccaaatctttgttttc

SEQ ID NO: 13503 - RNA, 22 nt, synthetic construct
  source 1..22: mol_type = other RNA
aaaacataattagattgcttca

SEQ ID NO: 13504 - RNA, 22 nt, synthetic construct
  source 1..22: mol_type = other RNA
aaaacttttcttttcaggagaa

SEQ ID NO: 13505 - RNA, 22 nt, synthetic construct
  source 1..22: mol_type = other RNA
aaaagatacctgaataaccctc

SEQ ID NO: 13506 - RNA, 22 nt, synthetic construct
  source 1..22: mol_type = other RNA
aaaaggacacttcaactgtcca

SEQ ID NO: 13507 - RNA, 22 nt, synthetic construct
  source 1..22: mol_type = other RNA
aaaattctcctgaaaagaaaag

SEQ ID NO: 13508 - RNA, 22 nt, synthetic construct
  source 1..22: mol_type = other RNA
aaacaaagatttggtgttttct

SEQ ID NO: 13509 - RNA, 22 nt, synthetic construct
  source 1..22: mol_type = other RNA
aaacaccaaatctttgttttcc

SEQ ID NO: 13510 - RNA, 22 nt, synthetic construct
  source 1..22: mol_type = other RNA
aaacataattagattgcttcac

SEQ ID NO: 13511 - RNA, 22 nt, synthetic construct
  source 1..22: mol_type = other RNA
aaaccaactatacgctacatct

SEQ ID NO: 13512 - RNA, 22 nt, synthetic construct
  source 1..22: mol_type = other RNA
aaacttttcttttcaggagaat

SEQ ID NO: 13513 - RNA, 22 nt, synthetic construct
  source 1..22: mol_type = other RNA
aaagacaacaaacattatattg

SEQ ID NO: 13514 - RNA, 22 nt, synthetic construct
  source 1..22: mol_type = other RNA
aaagatacctgaataaccctct

SEQ ID NO: 13515 - RNA, 22 nt, synthetic construct
  source 1..22: mol_type = other RNA
aaagatttggtgttttctactt

SEQ ID NO: 13516 - RNA, 22 nt, synthetic construct
  source 1..22: mol_type = other RNA
aaagcaaaaggacacttcaact

SEQ ID NO: 13517 - RNA, 22 nt, synthetic construct
  source 1..22: mol_type = other RNA
aaaggacacttcaactgtccag

SEQ ID NO: 13518 - RNA, 22 nt, synthetic construct
  source 1..22: mol_type = other RNA
aaagtattggtatcagaaaaag

SEQ ID NO: 13519 - RNA, 22 nt, synthetic construct
  source 1..22: mol_type = other RNA
aaataaagtattggtatcagaa

SEQ ID NO: 13520 - RNA, 22 nt, synthetic construct
  source 1..22: mol_type = other RNA
aaatcacgaaaccaactatacg

SEQ ID NO: 13521 - RNA, 22 nt, synthetic construct
  source 1..22: mol_type = other RNA
aaatctttgttttccgggattg

SEQ ID NO: 13522 - RNA, 22 nt, synthetic construct
  source 1..22: mol_type = other RNA
aaattctcctgaaaagaaaagt

SEQ ID NO: 13523 - RNA, 22 nt, synthetic construct
  source 1..22: mol_type = other RNA
aacaaagatttggtgttttcta

SEQ ID NO: 13524 - RNA, 22 nt, synthetic construct
  source 1..22: mol_type = other RNA
aacaccaaatctttgttttccg

SEQ ID NO: 13525 - RNA, 22 nt, synthetic construct
  source 1..22: mol_type = other RNA
aacataattagattgcttcact

SEQ ID NO: 13526 - RNA, 22 nt, synthetic construct
  source 1..22: mol_type = other RNA
aaccaaaattctcctgaaaaga

SEQ ID NO: 13527 - RNA, 22 nt, synthetic construct
  source 1..22: mol_type = other RNA
aaccaactatacgctacatcta

SEQ ID NO: 13528 - RNA, 22 nt, synthetic construct
  source 1..22: mol_type = other RNA
aaccctctggacagttgaagtg

SEQ ID NO: 13529 - RNA, 22 nt, synthetic construct
  source 1..22: mol_type = other RNA
aactagatgtagcgtatagttg

SEQ ID NO: 13530 - RNA, 22 nt, synthetic construct
  source 1..22: mol_type = other RNA
aactatacgctacatctagttg

SEQ ID NO: 13531 - RNA, 22 nt, synthetic construct
  source 1..22: mol_type = other RNA
aactcaattcgtaaaacataat

SEQ ID NO: 13532 - RNA, 22 nt, synthetic construct
  source 1..22: mol_type = other RNA
aactgtccagagggttattcag

SEQ ID NO: 13533 - RNA, 22 nt, synthetic construct
  source 1..22: mol_type = other RNA
aacttttcttttcaggagaatt

SEQ ID NO: 13534 - RNA, 22 nt, synthetic construct
  source 1..22: mol_type = other RNA
aagacaacaaacattatattga

SEQ ID NO: 13535 - RNA, 22 nt, synthetic construct
  source 1..22: mol_type = other RNA
aagactggaaagacaacaaaca

SEQ ID NO: 13536 - RNA, 22 nt, synthetic construct
  source 1..22: mol_type = other RNA
aagatacctgaataaccctctg

SEQ ID NO: 13537 - RNA, 22 nt, synthetic construct
  source 1..22: mol_type = other RNA
aagatatactccatagtgaagc

SEQ ID NO: 13538 - RNA, 22 nt, synthetic construct
  source 1..22: mol_type = other RNA
aagatttggtgttttctacttg

SEQ ID NO: 13539 - RNA, 22 nt, synthetic construct
  source 1..22: mol_type = other RNA
aagcaaaaggacacttcaactg

SEQ ID NO: 13540 - RNA, 22 nt, synthetic construct
  source 1..22: mol_type = other RNA
aagcaatctaattatgttttac

SEQ ID NO: 13541 - RNA, 22 nt, synthetic construct
  source 1..22: mol_type = other RNA
aaggacacttcaactgtccaga

SEQ ID NO: 13542 - RNA, 22 nt, synthetic construct
  source 1..22: mol_type = other RNA
aagtagaaaacaccaaatcttt

SEQ ID NO: 13543 - RNA, 22 nt, synthetic construct
  source 1..22: mol_type = other RNA
aagtattggtatcagaaaaaga

SEQ ID NO: 13544 - RNA, 22 nt, synthetic construct
  source 1..22: mol_type = other RNA
aagtgtccttttgctttgtgat

SEQ ID NO: 13545 - RNA, 22 nt, synthetic construct
  source 1..22: mol_type = other RNA
aataaagtattggtatcagaaa

SEQ ID NO: 13546 - RNA, 22 nt, synthetic construct
  source 1..22: mol_type = other RNA
aataaccctctggacagttgaa

SEQ ID NO: 13547 - RNA, 22 nt, synthetic construct
  source 1..22: mol_type = other RNA
aatataatgtttgttgtctttc

SEQ ID NO: 13548 - RNA, 22 nt, synthetic construct
  source 1..22: mol_type = other RNA
aatattctttttacttgggaaa

SEQ ID NO: 13549 - RNA, 22 nt, synthetic construct
  source 1..22: mol_type = other RNA
aatcacgaaaccaactatacgc

SEQ ID NO: 13550 - RNA, 22 nt, synthetic construct
  source 1..22: mol_type = other RNA
aatcccggaaaacaaagatttg

SEQ ID NO: 13551 - RNA, 22 nt, synthetic construct
  source 1..22: mol_type = other RNA
aatcgcaactagatgtagcgta

SEQ ID NO: 13552 - RNA, 22 nt, synthetic construct
  source 1..22: mol_type = other RNA
aatctttgttttccgggattgc

SEQ ID NO: 13553 - RNA, 22 nt, synthetic construct
  source 1..22: mol_type = other RNA
aatgcaatcccggaaaacaaag

SEQ ID NO: 13554 - RNA, 22 nt, synthetic construct
  source 1..22: mol_type = other RNA
aatgtccccaatgcaatcccgg

SEQ ID NO: 13555 - RNA, 22 nt, synthetic construct
  source 1..22: mol_type = other RNA
aatgtttgttgtctttccagtc

SEQ ID NO: 13556 - RNA, 22 nt, synthetic construct
  source 1..22: mol_type = other RNA
aattagattgcttcactatgga

SEQ ID NO: 13557 - RNA, 22 nt, synthetic construct
  source 1..22: mol_type = other RNA
aattatgttttacgaattgagt

SEQ ID NO: 13558 - RNA, 22 nt, synthetic construct
  source 1..22: mol_type = other RNA
aattctcctgaaaagaaaagtt

SEQ ID NO: 13559 - RNA, 22 nt, synthetic construct
  source 1..22: mol_type = other RNA
aattgagttggaagactggaaa

SEQ ID NO: 13560 - RNA, 22 nt, synthetic construct
  source 1..22: mol_type = other RNA
aattttggttgggcctagagaa

SEQ ID NO: 13561 - RNA, 22 nt, synthetic construct
  source 1..22: mol_type = other RNA
acaaagatttggtgttttctac

SEQ ID NO: 13562 - RNA, 22 nt, synthetic construct
  source 1..22: mol_type = other RNA
acaaagcaaaaggacacttcaa

SEQ ID NO: 13563 - RNA, 22 nt, synthetic construct
  source 1..22: mol_type = other RNA
acaccaaatctttgttttccgg

SEQ ID NO: 13564 - RNA, 22 nt, synthetic construct
  source 1..22: mol_type = other RNA
acacttcaactgtccagagggt

SEQ ID NO: 13565 - RNA, 22 nt, synthetic construct
  source 1..22: mol_type = other RNA
acagttgaagtgtccttttgct

SEQ ID NO: 13566 - RNA, 22 nt, synthetic construct
  source 1..22: mol_type = other RNA
acataattagattgcttcacta

SEQ ID NO: 13567 - RNA, 22 nt, synthetic construct
  source 1..22: mol_type = other RNA
acatctagttgcgattactggc

SEQ ID NO: 13568 - RNA, 22 nt, synthetic construct
  source 1..22: mol_type = other RNA
acattgccagtaatcgcaacta

SEQ ID NO: 13569 - RNA, 22 nt, synthetic construct
  source 1..22: mol_type = other RNA
accaaaattctcctgaaaagaa

SEQ ID NO: 13570 - RNA, 22 nt, synthetic construct
  source 1..22: mol_type = other RNA
accaaatctttgttttccggga

SEQ ID NO: 13571 - RNA, 22 nt, synthetic construct
  source 1..22: mol_type = other RNA
accaactatacgctacatctag

SEQ ID NO: 13572 - RNA, 22 nt, synthetic construct
  source 1..22: mol_type = other RNA
accctctggacagttgaagtgt

SEQ ID NO: 13573 - RNA, 22 nt, synthetic construct
  source 1..22: mol_type = other RNA
acctgaataaccctctggacag

SEQ ID NO: 13574 - RNA, 22 nt, synthetic construct
  source 1..22: mol_type = other RNA
acgaaaccaactatacgctaca

SEQ ID NO: 13575 - RNA, 22 nt, synthetic construct
  source 1..22: mol_type = other RNA
acgaattgagttggaagactgg

SEQ ID NO: 13576 - RNA, 22 nt, synthetic construct
  source 1..22: mol_type = other RNA
acgctacatctagttgcgatta

SEQ ID NO: 13577 - RNA, 22 nt, synthetic construct
  source 1..22: mol_type = other RNA
actagatgtagcgtatagttgg

SEQ ID NO: 13578 - RNA, 22 nt, synthetic construct
  source 1..22: mol_type = other RNA
actatacgctacatctagttgc

SEQ ID NO: 13579 - RNA, 22 nt, synthetic construct
  source 1..22: mol_type = other RNA
actatggagtatatcttctcta

SEQ ID NO: 13580 - RNA, 22 nt, synthetic construct
  source 1..22: mol_type = other RNA
actcaattcgtaaaacataatt

SEQ ID NO: 13581 - RNA, 22 nt, synthetic construct
  source 1..22: mol_type = other RNA
actcacagatttttaaaacttt

SEQ ID NO: 13582 - RNA, 22 nt, synthetic construct
  source 1..22: mol_type = other RNA
actccatagtgaagcaatctaa

SEQ ID NO: 13583 - RNA, 22 nt, synthetic construct
  source 1..22: mol_type = other RNA
actggaaagacaacaaacatta

SEQ ID NO: 13584 - RNA, 22 nt, synthetic construct
  source 1..22: mol_type = other RNA
actggcaatgtccccaatgcaa

SEQ ID NO: 13585 - RNA, 22 nt, synthetic construct
  source 1..22: mol_type = other RNA
actgtccagagggttattcagg

SEQ ID NO: 13586 - RNA, 22 nt, synthetic construct
  source 1..22: mol_type = other RNA
acttcaactgtccagagggtta

SEQ ID NO: 13587 - RNA, 22 nt, synthetic construct
  source 1..22: mol_type = other RNA
acttgggaaatcacgaaaccaa

SEQ ID NO: 13588 - RNA, 22 nt, synthetic construct
  source 1..22: mol_type = other RNA
acttgggatcacaaagcaaaag

SEQ ID NO: 13589 - RNA, 22 nt, synthetic construct
  source 1..22: mol_type = other RNA
acttttcttttcaggagaattt

SEQ ID NO: 13590 - RNA, 22 nt, synthetic construct
  source 1..22: mol_type = other RNA
agaaaaagatacctgaataacc

SEQ ID NO: 13591 - RNA, 22 nt, synthetic construct
  source 1..22: mol_type = other RNA
agaaaacaccaaatctttgttt

SEQ ID NO: 13592 - RNA, 22 nt, synthetic construct
  source 1..22: mol_type = other RNA
agaagatatactccatagtgaa

SEQ ID NO: 13593 - RNA, 22 nt, synthetic construct
  source 1..22: mol_type = other RNA
agaattttggttgggcctagag

SEQ ID NO: 13594 - RNA, 22 nt, synthetic construct
  source 1..22: mol_type = other RNA
agacaacaaacattatattgaa

SEQ ID NO: 13595 - RNA, 22 nt, synthetic construct
  source 1..22: mol_type = other RNA
agactggaaagacaacaaacat

SEQ ID NO: 13596 - RNA, 22 nt, synthetic construct
  source 1..22: mol_type = other RNA
agagaagatatactccatagtg

SEQ ID NO: 13597 - RNA, 22 nt, synthetic construct
  source 1..22: mol_type = other RNA
agagggttattcaggtatcttt

SEQ ID NO: 13598 - RNA, 22 nt, synthetic construct
  source 1..22: mol_type = other RNA
agatacctgaataaccctctgg

SEQ ID NO: 13599 - RNA, 22 nt, synthetic construct
  source 1..22: mol_type = other RNA
agatatactccatagtgaagca

SEQ ID NO: 13600 - RNA, 22 nt, synthetic construct
  source 1..22: mol_type = other RNA
agatgtagcgtatagttggttt

SEQ ID NO: 13601 - RNA, 22 nt, synthetic construct
  source 1..22: mol_type = other RNA
agattgcttcactatggagtat

SEQ ID NO: 13602 - RNA, 22 nt, synthetic construct
  source 1..22: mol_type = other RNA
agatttggtgttttctacttgg

SEQ ID NO: 13603 - RNA, 22 nt, synthetic construct
  source 1..22: mol_type = other RNA
agcaaaaggacacttcaactgt

SEQ ID NO: 13604 - RNA, 22 nt, synthetic construct
  source 1..22: mol_type = other RNA
agcaatctaattatgttttacg

SEQ ID NO: 13605 - RNA, 22 nt, synthetic construct
  source 1..22: mol_type = other RNA
agcgtatagttggtttcgtgat

SEQ ID NO: 13606 - RNA, 22 nt, synthetic construct
  source 1..22: mol_type = other RNA
aggacacttcaactgtccagag

SEQ ID NO: 13607 - RNA, 22 nt, synthetic construct
  source 1..22: mol_type = other RNA
aggagaattttggttgggccta

SEQ ID NO: 13608 - RNA, 22 nt, synthetic construct
  source 1..22: mol_type = other RNA
aggcccaaccaaaattctcctg

SEQ ID NO: 13609 - RNA, 22 nt, synthetic construct
  source 1..22: mol_type = other RNA
agggttattcaggtatcttttt

SEQ ID NO: 13610 - RNA, 22 nt, synthetic construct
  source 1..22: mol_type = other RNA
aggtatctttttctgataccaa

SEQ ID NO: 13611 - RNA, 22 nt, synthetic construct
  source 1..22: mol_type = other RNA
agtaatcgcaactagatgtagc

SEQ ID NO: 13612 - RNA, 22 nt, synthetic construct
  source 1..22: mol_type = other RNA
agtagaaaacaccaaatctttg

SEQ ID NO: 13613 - RNA, 22 nt, synthetic construct
  source 1..22: mol_type = other RNA
agtatatcttctctaggcccaa

SEQ ID NO: 13614 - RNA, 22 nt, synthetic construct
  source 1..22: mol_type = other RNA
agtattggtatcagaaaaagat

SEQ ID NO: 13615 - RNA, 22 nt, synthetic construct
  source 1..22: mol_type = other RNA
agtcttccaactcaattcgtaa

SEQ ID NO: 13616 - RNA, 22 nt, synthetic construct
  source 1..22: mol_type = other RNA
agtgaagcaatctaattatgtt

SEQ ID NO: 13617 - RNA, 22 nt, synthetic construct
  source 1..22: mol_type = other RNA
agtgtccttttgctttgtgatc

SEQ ID NO: 13618 - RNA, 22 nt, synthetic construct
  source 1..22: mol_type = other RNA
agttgaagtgtccttttgcttt

SEQ ID NO: 13619 - RNA, 22 nt, synthetic construct
  source 1..22: mol_type = other RNA
agttgcgattactggcaatgtc

SEQ ID NO: 13620 - RNA, 22 nt, synthetic construct
  source 1..22: mol_type = other RNA
agttggaagactggaaagacaa

SEQ ID NO: 13621 - RNA, 22 nt, synthetic construct
  source 1..22: mol_type = other RNA
agttggtttcgtgatttcccaa

SEQ ID NO: 13622 - RNA, 22 nt, synthetic construct
  source 1..22: mol_type = other RNA
ataaagtattggtatcagaaaa

SEQ ID NO: 13623 - RNA, 22 nt, synthetic construct
  source 1..22: mol_type = other RNA
ataaccctctggacagttgaag

SEQ ID NO: 13624 - RNA, 22 nt, synthetic construct
  source 1..22: mol_type = other RNA
ataatgtttgttgtctttccag

SEQ ID NO: 13625 - RNA, 22 nt, synthetic construct
  source 1..22: mol_type = other RNA
ataattagattgcttcactatg

SEQ ID NO: 13626 - RNA, 22 nt, synthetic construct
  source 1..22: mol_type = other RNA
atacctgaataaccctctggac

SEQ ID NO: 13627 - RNA, 22 nt, synthetic construct
  source 1..22: mol_type = other RNA
atacgctacatctagttgcgat

SEQ ID NO: 13628 - RNA, 22 nt, synthetic construct
  source 1..22: mol_type = other RNA
atactccatagtgaagcaatct

SEQ ID NO: 13629 - RNA, 22 nt, synthetic construct
  source 1..22: mol_type = other RNA
atagtgaagcaatctaattatg

SEQ ID NO: 13630 - RNA, 22 nt, synthetic construct
  source 1..22: mol_type = other RNA
atagttggtttcgtgatttccc

SEQ ID NO: 13631 - RNA, 22 nt, synthetic construct
  source 1..22: mol_type = other RNA
atataatgtttgttgtctttcc

SEQ ID NO: 13632 - RNA, 22 nt, synthetic construct
  source 1..22: mol_type = other RNA
atatactccatagtgaagcaat

SEQ ID NO: 13633 - RNA, 22 nt, synthetic construct
  source 1..22: mol_type = other RNA
atatcttctctaggcccaacca

SEQ ID NO: 13634 - RNA, 22 nt, synthetic construct
  source 1..22: mol_type = other RNA
atattctttttacttgggaaat

SEQ ID NO: 13635 - RNA, 22 nt, synthetic construct
  source 1..22: mol_type = other RNA
atcacaaagcaaaaggacactt

SEQ ID NO: 13636 - RNA, 22 nt, synthetic construct
  source 1..22: mol_type = other RNA
atcacgaaaccaactatacgct

SEQ ID NO: 13637 - RNA, 22 nt, synthetic construct
  source 1..22: mol_type = other RNA
atcagaaaaagatacctgaata

SEQ ID NO: 13638 - RNA, 22 nt, synthetic construct
  source 1..22: mol_type = other RNA
atcccaagtagaaaacaccaaa

SEQ ID NO: 13639 - RNA, 22 nt, synthetic construct
  source 1..22: mol_type = other RNA
atcccggaaaacaaagatttgg

SEQ ID NO: 13640 - RNA, 22 nt, synthetic construct
  source 1..22: mol_type = other RNA
atcgcaactagatgtagcgtat

SEQ ID NO: 13641 - RNA, 22 nt, synthetic construct
  source 1..22: mol_type = other RNA
atctagttgcgattactggcaa

SEQ ID NO: 13642 - RNA, 22 nt, synthetic construct
  source 1..22: mol_type = other RNA
atcttctctaggcccaaccaaa

SEQ ID NO: 13643 - RNA, 22 nt, synthetic construct
  source 1..22: mol_type = other RNA
atctttgttttccgggattgca

SEQ ID NO: 13644 - RNA, 22 nt, synthetic construct
  source 1..22: mol_type = other RNA
atgcaatcccggaaaacaaaga

SEQ ID NO: 13645 - RNA, 22 nt, synthetic construct
  source 1..22: mol_type = other RNA
atggagtatatcttctctaggc

SEQ ID NO: 13646 - RNA, 22 nt, synthetic construct
  source 1..22: mol_type = other RNA
atgtagcgtatagttggtttcg

SEQ ID NO: 13647 - RNA, 22 nt, synthetic construct
  source 1..22: mol_type = other RNA
atgtccccaatgcaatcccgga

SEQ ID NO: 13648 - RNA, 22 nt, synthetic construct
  source 1..22: mol_type = other RNA
atgtttgttgtctttccagtct

SEQ ID NO: 13649 - RNA, 22 nt, synthetic construct
  source 1..22: mol_type = other RNA
atgttttacgaattgagttgga

SEQ ID NO: 13650 - RNA, 22 nt, synthetic construct
  source 1..22: mol_type = other RNA
attactggcaatgtccccaatg

SEQ ID NO: 13651 - RNA, 22 nt, synthetic construct
  source 1..22: mol_type = other RNA
attagattgcttcactatggag

SEQ ID NO: 13652 - RNA, 22 nt, synthetic construct
  source 1..22: mol_type = other RNA
attatgttttacgaattgagtt

SEQ ID NO: 13653 - RNA, 22 nt, synthetic construct
  source 1..22: mol_type = other RNA
attcaatataatgtttgttgtc

SEQ ID NO: 13654 - RNA, 22 nt, synthetic construct
  source 1..22: mol_type = other RNA
attcaggtatctttttctgata

SEQ ID NO: 13655 - RNA, 22 nt, synthetic construct
  source 1..22: mol_type = other RNA
attctcctgaaaagaaaagttt

SEQ ID NO: 13656 - RNA, 22 nt, synthetic construct
  source 1..22: mol_type = other RNA
attctttttacttgggaaatca

SEQ ID NO: 13657 - RNA, 22 nt, synthetic construct
  source 1..22: mol_type = other RNA
attgaatattctttttacttgg

SEQ ID NO: 13658 - RNA, 22 nt, synthetic construct
  source 1..22: mol_type = other RNA
attgagttggaagactggaaag

SEQ ID NO: 13659 - RNA, 22 nt, synthetic construct
  source 1..22: mol_type = other RNA
attgcattggggacattgccag

SEQ ID NO: 13660 - RNA, 22 nt, synthetic construct
  source 1..22: mol_type = other RNA
attgccagtaatcgcaactaga

SEQ ID NO: 13661 - RNA, 22 nt, synthetic construct
  source 1..22: mol_type = other RNA
attgcttcactatggagtatat

SEQ ID NO: 13662 - RNA, 22 nt, synthetic construct
  source 1..22: mol_type = other RNA
attggggacattgccagtaatc

SEQ ID NO: 13663 - RNA, 22 nt, synthetic construct
  source 1..22: mol_type = other RNA
attggtatcagaaaaagatacc

SEQ ID NO: 13664 - RNA, 22 nt, synthetic construct
  source 1..22: mol_type = other RNA
atttcccaagtaaaaagaatat

SEQ ID NO: 13665 - RNA, 22 nt, synthetic construct
  source 1..22: mol_type = other RNA
atttggtgttttctacttggga

SEQ ID NO: 13666 - RNA, 22 nt, synthetic construct
  source 1..22: mol_type = other RNA
attttggttgggcctagagaag

SEQ ID NO: 13667 - RNA, 22 nt, synthetic construct
  source 1..22: mol_type = other RNA
caaaaggacacttcaactgtcc

SEQ ID NO: 13668 - RNA, 22 nt, synthetic construct
  source 1..22: mol_type = other RNA
caaaattctcctgaaaagaaaa

SEQ ID NO: 13669 - RNA, 22 nt, synthetic construct
  source 1..22: mol_type = other RNA
caaagatttggtgttttctact

SEQ ID NO: 13670 - RNA, 22 nt, synthetic construct
  source 1..22: mol_type = other RNA
caaagcaaaaggacacttcaac

SEQ ID NO: 13671 - RNA, 22 nt, synthetic construct
  source 1..22: mol_type = other RNA
caaatctttgttttccgggatt

SEQ ID NO: 13672 - RNA, 22 nt, synthetic construct
  source 1..22: mol_type = other RNA
caaccaaaattctcctgaaaag

SEQ ID NO: 13673 - RNA, 22 nt, synthetic construct
  source 1..22: mol_type = other RNA
caactagatgtagcgtatagtt

SEQ ID NO: 13674 - RNA, 22 nt, synthetic construct
  source 1..22: mol_type = other RNA
caactatacgctacatctagtt

SEQ ID NO: 13675 - RNA, 22 nt, synthetic construct
  source 1..22: mol_type = other RNA
caactcaattcgtaaaacataa

SEQ ID NO: 13676 - RNA, 22 nt, synthetic construct
  source 1..22: mol_type = other RNA
caactgtccagagggttattca

SEQ ID NO: 13677 - RNA, 22 nt, synthetic construct
  source 1..22: mol_type = other RNA
caagtagaaaacaccaaatctt

SEQ ID NO: 13678 - RNA, 22 nt, synthetic construct
  source 1..22: mol_type = other RNA
caatataatgtttgttgtcttt

SEQ ID NO: 13679 - RNA, 22 nt, synthetic construct
  source 1..22: mol_type = other RNA
caatcccggaaaacaaagattt

SEQ ID NO: 13680 - RNA, 22 nt, synthetic construct
  source 1..22: mol_type = other RNA
caatctaattatgttttacgaa

SEQ ID NO: 13681 - RNA, 22 nt, synthetic construct
  source 1..22: mol_type = other RNA
caatgcaatcccggaaaacaaa

SEQ ID NO: 13682 - RNA, 22 nt, synthetic construct
  source 1..22: mol_type = other RNA
caatgtccccaatgcaatcccg

SEQ ID NO: 13683 - RNA, 22 nt, synthetic construct
  source 1..22: mol_type = other RNA
caattcgtaaaacataattaga

SEQ ID NO: 13684 - RNA, 22 nt, synthetic construct
  source 1..22: mol_type = other RNA
cacaaagcaaaaggacacttca

SEQ ID NO: 13685 - RNA, 22 nt, synthetic construct
  source 1..22: mol_type = other RNA
cacagatttttaaaacttttct

SEQ ID NO: 13686 - RNA, 22 nt, synthetic construct
  source 1..22: mol_type = other RNA
caccaaatctttgttttccggg

SEQ ID NO: 13687 - RNA, 22 nt, synthetic construct
  source 1..22: mol_type = other RNA
cacgaaaccaactatacgctac

SEQ ID NO: 13688 - RNA, 22 nt, synthetic construct
  source 1..22: mol_type = other RNA
cactatggagtatatcttctct

SEQ ID NO: 13689 - RNA, 22 nt, synthetic construct
  source 1..22: mol_type = other RNA
cacttcaactgtccagagggtt

SEQ ID NO: 13690 - RNA, 22 nt, synthetic construct
  source 1..22: mol_type = other RNA
cagaaaaagatacctgaataac

SEQ ID NO: 13691 - RNA, 22 nt, synthetic construct
  source 1..22: mol_type = other RNA
cagagggttattcaggtatctt

SEQ ID NO: 13692 - RNA, 22 nt, synthetic construct
  source 1..22: mol_type = other RNA
caggagaattttggttgggcct

SEQ ID NO: 13693 - RNA, 22 nt, synthetic construct
  source 1..22: mol_type = other RNA
caggtatctttttctgatacca

SEQ ID NO: 13694 - RNA, 22 nt, synthetic construct
  source 1..22: mol_type = other RNA
cagtaatcgcaactagatgtag

SEQ ID NO: 13695 - RNA, 22 nt, synthetic construct
  source 1..22: mol_type = other RNA
cagtcttccaactcaattcgta

SEQ ID NO: 13696 - RNA, 22 nt, synthetic construct
  source 1..22: mol_type = other RNA
cagttgaagtgtccttttgctt

SEQ ID NO: 13697 - RNA, 22 nt, synthetic construct
  source 1..22: mol_type = other RNA
cataattagattgcttcactat

SEQ ID NO: 13698 - RNA, 22 nt, synthetic construct
  source 1..22: mol_type = other RNA
catagtgaagcaatctaattat

SEQ ID NO: 13699 - RNA, 22 nt, synthetic construct
  source 1..22: mol_type = other RNA
catctagttgcgattactggca

SEQ ID NO: 13700 - RNA, 22 nt, synthetic construct
  source 1..22: mol_type = other RNA
cattgccagtaatcgcaactag

SEQ ID NO: 13701 - RNA, 22 nt, synthetic construct
  source 1..22: mol_type = other RNA
cattggggacattgccagtaat

SEQ ID NO: 13702 - RNA, 22 nt, synthetic construct
  source 1..22: mol_type = other RNA
ccaaaattctcctgaaaagaaa

SEQ ID NO: 13703 - RNA, 22 nt, synthetic construct
  source 1..22: mol_type = other RNA
ccaaatctttgttttccgggat

SEQ ID NO: 13704 - RNA, 22 nt, synthetic construct
  source 1..22: mol_type = other RNA
ccaaccaaaattctcctgaaaa

SEQ ID NO: 13705 - RNA, 22 nt, synthetic construct
  source 1..22: mol_type = other RNA
ccaactatacgctacatctagt

SEQ ID NO: 13706 - RNA, 22 nt, synthetic construct
  source 1..22: mol_type = other RNA
ccaactcaattcgtaaaacata

SEQ ID NO: 13707 - RNA, 22 nt, synthetic construct
  source 1..22: mol_type = other RNA
ccaagtaaaaagaatattcaat

SEQ ID NO: 13708 - RNA, 22 nt, synthetic construct
  source 1..22: mol_type = other RNA
ccaagtagaaaacaccaaatct

SEQ ID NO: 13709 - RNA, 22 nt, synthetic construct
  source 1..22: mol_type = other RNA
ccaatgcaatcccggaaaacaa

SEQ ID NO: 13710 - RNA, 22 nt, synthetic construct
  source 1..22: mol_type = other RNA
ccagagggttattcaggtatct

SEQ ID NO: 13711 - RNA, 22 nt, synthetic construct
  source 1..22: mol_type = other RNA
ccagtaatcgcaactagatgta

SEQ ID NO: 13712 - RNA, 22 nt, synthetic construct
  source 1..22: mol_type = other RNA
ccagtcttccaactcaattcgt

SEQ ID NO: 13713 - RNA, 22 nt, synthetic construct
  source 1..22: mol_type = other RNA
ccatagtgaagcaatctaatta

SEQ ID NO: 13714 - RNA, 22 nt, synthetic construct
  source 1..22: mol_type = other RNA
cccaaccaaaattctcctgaaa

SEQ ID NO: 13715 - RNA, 22 nt, synthetic construct
  source 1..22: mol_type = other RNA
cccaagtaaaaagaatattcaa

SEQ ID NO: 13716 - RNA, 22 nt, synthetic construct
  source 1..22: mol_type = other RNA
cccaagtagaaaacaccaaatc

SEQ ID NO: 13717 - RNA, 22 nt, synthetic construct
  source 1..22: mol_type = other RNA
cccaatgcaatcccggaaaaca

SEQ ID NO: 13718 - RNA, 22 nt, synthetic construct
  source 1..22: mol_type = other RNA
ccccaatgcaatcccggaaaac

SEQ ID NO: 13719 - RNA, 22 nt, synthetic construct
  source 1..22: mol_type = other RNA
cccggaaaacaaagatttggtg

SEQ ID NO: 13720 - RNA, 22 nt, synthetic construct
  source 1..22: mol_type = other RNA
ccctctggacagttgaagtgtc

SEQ ID NO: 13721 - RNA, 22 nt, synthetic construct
  source 1..22: mol_type = other RNA
ccggaaaacaaagatttggtgt

SEQ ID NO: 13722 - RNA, 22 nt, synthetic construct
  source 1..22: mol_type = other RNA
ccgggattgcattggggacatt

SEQ ID NO: 13723 - RNA, 22 nt, synthetic construct
  source 1..22: mol_type = other RNA
cctagagaagatatactccata

SEQ ID NO: 13724 - RNA, 22 nt, synthetic construct
  source 1..22: mol_type = other RNA
cctctggacagttgaagtgtcc

SEQ ID NO: 13725 - RNA, 22 nt, synthetic construct
  source 1..22: mol_type = other RNA
cctgaaaagaaaagttttaaaa

SEQ ID NO: 13726 - RNA, 22 nt, synthetic construct
  source 1..22: mol_type = other RNA
cctgaataaccctctggacagt

SEQ ID NO: 13727 - RNA, 22 nt, synthetic construct
  source 1..22: mol_type = other RNA
ccttttgctttgtgatcccaag

SEQ ID NO: 13728 - RNA, 22 nt, synthetic construct
  source 1..22: mol_type = other RNA
cgaaaccaactatacgctacat

SEQ ID NO: 13729 - RNA, 22 nt, synthetic construct
  source 1..22: mol_type = other RNA
cgaattgagttggaagactgga

SEQ ID NO: 13730 - RNA, 22 nt, synthetic construct
  source 1..22: mol_type = other RNA
cgattactggcaatgtccccaa

SEQ ID NO: 13731 - RNA, 22 nt, synthetic construct
  source 1..22: mol_type = other RNA
cgcaactagatgtagcgtatag

SEQ ID NO: 13732 - RNA, 22 nt, synthetic construct
  source 1..22: mol_type = other RNA
cgctacatctagttgcgattac

SEQ ID NO: 13733 - RNA, 22 nt, synthetic construct
  source 1..22: mol_type = other RNA
cggaaaacaaagatttggtgtt

SEQ ID NO: 13734 - RNA, 22 nt, synthetic construct
  source 1..22: mol_type = other RNA
cgggattgcattggggacattg

SEQ ID NO: 13735 - RNA, 22 nt, synthetic construct
  source 1..22: mol_type = other RNA
cgtaaaacataattagattgct

SEQ ID NO: 13736 - RNA, 22 nt, synthetic construct
  source 1..22: mol_type = other RNA
cgtatagttggtttcgtgattt

SEQ ID NO: 13737 - RNA, 22 nt, synthetic construct
  source 1..22: mol_type = other RNA
cgtgatttcccaagtaaaaaga

SEQ ID NO: 13738 - RNA, 22 nt, synthetic construct
  source 1..22: mol_type = other RNA
ctaattatgttttacgaattga

SEQ ID NO: 13739 - RNA, 22 nt, synthetic construct
  source 1..22: mol_type = other RNA
ctacatctagttgcgattactg

SEQ ID NO: 13740 - RNA, 22 nt, synthetic construct
  source 1..22: mol_type = other RNA
ctacttgggatcacaaagcaaa

SEQ ID NO: 13741 - RNA, 22 nt, synthetic construct
  source 1..22: mol_type = other RNA
ctagagaagatatactccatag

SEQ ID NO: 13742 - RNA, 22 nt, synthetic construct
  source 1..22: mol_type = other RNA
ctagatgtagcgtatagttggt

SEQ ID NO: 13743 - RNA, 22 nt, synthetic construct
  source 1..22: mol_type = other RNA
ctaggcccaaccaaaattctcc

SEQ ID NO: 13744 - RNA, 22 nt, synthetic construct
  source 1..22: mol_type = other RNA
ctagttgcgattactggcaatg

SEQ ID NO: 13745 - RNA, 22 nt, synthetic construct
  source 1..22: mol_type = other RNA
ctatacgctacatctagttgcg

SEQ ID NO: 13746 - RNA, 22 nt, synthetic construct
  source 1..22: mol_type = other RNA
ctatggagtatatcttctctag

SEQ ID NO: 13747 - RNA, 22 nt, synthetic construct
  source 1..22: mol_type = other RNA
ctcaattcgtaaaacataatta

SEQ ID NO: 13748 - RNA, 22 nt, synthetic construct
  source 1..22: mol_type = other RNA
ctcacagatttttaaaactttt

SEQ ID NO: 13749 - RNA, 22 nt, synthetic construct
  source 1..22: mol_type = other RNA
ctccatagtgaagcaatctaat

SEQ ID NO: 13750 - RNA, 22 nt, synthetic construct
  source 1..22: mol_type = other RNA
ctcctgaaaagaaaagttttaa

SEQ ID NO: 13751 - RNA, 22 nt, synthetic construct
  source 1..22: mol_type = other RNA
ctctaggcccaaccaaaattct

SEQ ID NO: 13752 - RNA, 22 nt, synthetic construct
  source 1..22: mol_type = other RNA
ctctggacagttgaagtgtcct

SEQ ID NO: 13753 - RNA, 22 nt, synthetic construct
  source 1..22: mol_type = other RNA
ctgaataaccctctggacagtt

SEQ ID NO: 13754 - RNA, 22 nt, synthetic construct
  source 1..22: mol_type = other RNA
ctggaaagacaacaaacattat

SEQ ID NO: 13755 - RNA, 22 nt, synthetic construct
  source 1..22: mol_type = other RNA
ctggacagttgaagtgtccttt

SEQ ID NO: 13756 - RNA, 22 nt, synthetic construct
  source 1..22: mol_type = other RNA
ctggcaatgtccccaatgcaat

SEQ ID NO: 13757 - RNA, 22 nt, synthetic construct
  source 1..22: mol_type = other RNA
ctgtccagagggttattcaggt

SEQ ID NO: 13758 - RNA, 22 nt, synthetic construct
  source 1..22: mol_type = other RNA
cttcaactgtccagagggttat

SEQ ID NO: 13759 - RNA, 22 nt, synthetic construct
  source 1..22: mol_type = other RNA
cttcactatggagtatatcttc

SEQ ID NO: 13760 - RNA, 22 nt, synthetic construct
  source 1..22: mol_type = other RNA
cttccaactcaattcgtaaaac

SEQ ID NO: 13761 - RNA, 22 nt, synthetic construct
  source 1..22: mol_type = other RNA
cttctctaggcccaaccaaaat

SEQ ID NO: 13762 - RNA, 22 nt, synthetic construct
  source 1..22: mol_type = other RNA
cttgggaaatcacgaaaccaac

SEQ ID NO: 13763 - RNA, 22 nt, synthetic construct
  source 1..22: mol_type = other RNA
cttgggatcacaaagcaaaagg

SEQ ID NO: 13764 - RNA, 22 nt, synthetic construct
  source 1..22: mol_type = other RNA
ctttccagtcttccaactcaat

SEQ ID NO: 13765 - RNA, 22 nt, synthetic construct
  source 1..22: mol_type = other RNA
ctttgtgatcccaagtagaaaa

SEQ ID NO: 13766 - RNA, 22 nt, synthetic construct
  source 1..22: mol_type = other RNA
ctttgttttccgggattgcatt

SEQ ID NO: 13767 - RNA, 22 nt, synthetic construct
  source 1..22: mol_type = other RNA
cttttcaggagaattttggttg

SEQ ID NO: 13768 - RNA, 22 nt, synthetic construct
  source 1..22: mol_type = other RNA
cttttcttttcaggagaatttt

SEQ ID NO: 13769 - RNA, 22 nt, synthetic construct
  source 1..22: mol_type = other RNA
cttttgctttgtgatcccaagt

SEQ ID NO: 13770 - RNA, 22 nt, synthetic construct
  source 1..22: mol_type = other RNA
ctttttacttgggaaatcacga

SEQ ID NO: 13771 - RNA, 22 nt, synthetic construct
  source 1..22: mol_type = other RNA
gaaaaagatacctgaataaccc

SEQ ID NO: 13772 - RNA, 22 nt, synthetic construct
  source 1..22: mol_type = other RNA
gaaaacaaagatttggtgtttt

SEQ ID NO: 13773 - RNA, 22 nt, synthetic construct
  source 1..22: mol_type = other RNA
gaaaacaccaaatctttgtttt

SEQ ID NO: 13774 - RNA, 22 nt, synthetic construct
  source 1..22: mol_type = other RNA
gaaaccaactatacgctacatc

SEQ ID NO: 13775 - RNA, 22 nt, synthetic construct
  source 1..22: mol_type = other RNA
gaaagacaacaaacattatatt

SEQ ID NO: 13776 - RNA, 22 nt, synthetic construct
  source 1..22: mol_type = other RNA
gaaatcacgaaaccaactatac

SEQ ID NO: 13777 - RNA, 22 nt, synthetic construct
  source 1..22: mol_type = other RNA
gaagactggaaagacaacaaac

SEQ ID NO: 13778 - RNA, 22 nt, synthetic construct
  source 1..22: mol_type = other RNA
gaagatatactccatagtgaag

SEQ ID NO: 13779 - RNA, 22 nt, synthetic construct
  source 1..22: mol_type = other RNA
gaagcaatctaattatgtttta

SEQ ID NO: 13780 - RNA, 22 nt, synthetic construct
  source 1..22: mol_type = other RNA
gaagtgtccttttgctttgtga

SEQ ID NO: 13781 - RNA, 22 nt, synthetic construct
  source 1..22: mol_type = other RNA
gaataaccctctggacagttga

SEQ ID NO: 13782 - RNA, 22 nt, synthetic construct
  source 1..22: mol_type = other RNA
gaatattctttttacttgggaa

SEQ ID NO: 13783 - RNA, 22 nt, synthetic construct
  source 1..22: mol_type = other RNA
gaattgagttggaagactggaa

SEQ ID NO: 13784 - RNA, 22 nt, synthetic construct
  source 1..22: mol_type = other RNA
gaattttggttgggcctagaga

SEQ ID NO: 13785 - RNA, 22 nt, synthetic construct
  source 1..22: mol_type = other RNA
gacaacaaacattatattgaat

SEQ ID NO: 13786 - RNA, 22 nt, synthetic construct
  source 1..22: mol_type = other RNA
gacacttcaactgtccagaggg

SEQ ID NO: 13787 - RNA, 22 nt, synthetic construct
  source 1..22: mol_type = other RNA
gacagttgaagtgtccttttgc

SEQ ID NO: 13788 - RNA, 22 nt, synthetic construct
  source 1..22: mol_type = other RNA
gacattgccagtaatcgcaact

SEQ ID NO: 13789 - RNA, 22 nt, synthetic construct
  source 1..22: mol_type = other RNA
gactggaaagacaacaaacatt

SEQ ID NO: 13790 - RNA, 22 nt, synthetic construct
  source 1..22: mol_type = other RNA
gagaagatatactccatagtga

SEQ ID NO: 13791 - RNA, 22 nt, synthetic construct
  source 1..22: mol_type = other RNA
gagaattttggttgggcctaga

SEQ ID NO: 13792 - RNA, 22 nt, synthetic construct
  source 1..22: mol_type = other RNA
gagggttattcaggtatctttt

SEQ ID NO: 13793 - RNA, 22 nt, synthetic construct
  source 1..22: mol_type = other RNA
gagtatatcttctctaggccca

SEQ ID NO: 13794 - RNA, 22 nt, synthetic construct
  source 1..22: mol_type = other RNA
gagttggaagactggaaagaca

SEQ ID NO: 13795 - RNA, 22 nt, synthetic construct
  source 1..22: mol_type = other RNA
gatacctgaataaccctctgga

SEQ ID NO: 13796 - RNA, 22 nt, synthetic construct
  source 1..22: mol_type = other RNA
gatatactccatagtgaagcaa

SEQ ID NO: 13797 - RNA, 22 nt, synthetic construct
  source 1..22: mol_type = other RNA
gatcacaaagcaaaaggacact

SEQ ID NO: 13798 - RNA, 22 nt, synthetic construct
  source 1..22: mol_type = other RNA
gatcccaagtagaaaacaccaa

SEQ ID NO: 13799 - RNA, 22 nt, synthetic construct
  source 1..22: mol_type = other RNA
gatgtagcgtatagttggtttc

SEQ ID NO: 13800 - RNA, 22 nt, synthetic construct
  source 1..22: mol_type = other RNA
gattactggcaatgtccccaat

SEQ ID NO: 13801 - RNA, 22 nt, synthetic construct
  source 1..22: mol_type = other RNA
gattgcattggggacattgcca

SEQ ID NO: 13802 - RNA, 22 nt, synthetic construct
  source 1..22: mol_type = other RNA
gattgcttcactatggagtata

SEQ ID NO: 13803 - RNA, 22 nt, synthetic construct
  source 1..22: mol_type = other RNA
gatttcccaagtaaaaagaata

SEQ ID NO: 13804 - RNA, 22 nt, synthetic construct
  source 1..22: mol_type = other RNA
gatttggtgttttctacttggg

SEQ ID NO: 13805 - RNA, 22 nt, synthetic construct
  source 1..22: mol_type = other RNA
gcaaaaggacacttcaactgtc

SEQ ID NO: 13806 - RNA, 22 nt, synthetic construct
  source 1..22: mol_type = other RNA
gcaactagatgtagcgtatagt

SEQ ID NO: 13807 - RNA, 22 nt, synthetic construct
  source 1..22: mol_type = other RNA
gcaatcccggaaaacaaagatt

SEQ ID NO: 13808 - RNA, 22 nt, synthetic construct
  source 1..22: mol_type = other RNA
gcaatctaattatgttttacga

SEQ ID NO: 13809 - RNA, 22 nt, synthetic construct
  source 1..22: mol_type = other RNA
gcaatgtccccaatgcaatccc

SEQ ID NO: 13810 - RNA, 22 nt, synthetic construct
  source 1..22: mol_type = other RNA
gcattggggacattgccagtaa

SEQ ID NO: 13811 - RNA, 22 nt, synthetic construct
  source 1..22: mol_type = other RNA
gccagtaatcgcaactagatgt

SEQ ID NO: 13812 - RNA, 22 nt, synthetic construct
  source 1..22: mol_type = other RNA
gcccaaccaaaattctcctgaa

SEQ ID NO: 13813 - RNA, 22 nt, synthetic construct
  source 1..22: mol_type = other RNA
gcctagagaagatatactccat

SEQ ID NO: 13814 - RNA, 22 nt, synthetic construct
  source 1..22: mol_type = other RNA
gcgattactggcaatgtcccca

SEQ ID NO: 13815 - RNA, 22 nt, synthetic construct
  source 1..22: mol_type = other RNA
gcgtatagttggtttcgtgatt

SEQ ID NO: 13816 - RNA, 22 nt, synthetic construct
  source 1..22: mol_type = other RNA
gctacatctagttgcgattact

SEQ ID NO: 13817 - RNA, 22 nt, synthetic construct
  source 1..22: mol_type = other RNA
gcttcactatggagtatatctt

SEQ ID NO: 13818 - RNA, 22 nt, synthetic construct
  source 1..22: mol_type = other RNA
gctttgtgatcccaagtagaaa

SEQ ID NO: 13819 - RNA, 22 nt, synthetic construct
  source 1..22: mol_type = other RNA
ggaaaacaaagatttggtgttt

SEQ ID NO: 13820 - RNA, 22 nt, synthetic construct
  source 1..22: mol_type = other RNA
ggaaagacaacaaacattatat

SEQ ID NO: 13821 - RNA, 22 nt, synthetic construct
  source 1..22: mol_type = other RNA
ggaaatcacgaaaccaactata

SEQ ID NO: 13822 - RNA, 22 nt, synthetic construct
  source 1..22: mol_type = other RNA
ggaagactggaaagacaacaaa

SEQ ID NO: 13823 - RNA, 22 nt, synthetic construct
  source 1..22: mol_type = other RNA
ggacacttcaactgtccagagg

SEQ ID NO: 13824 - RNA, 22 nt, synthetic construct
  source 1..22: mol_type = other RNA
ggacagttgaagtgtccttttg

SEQ ID NO: 13825 - RNA, 22 nt, synthetic construct
  source 1..22: mol_type = other RNA
ggacattgccagtaatcgcaac

SEQ ID NO: 13826 - RNA, 22 nt, synthetic construct
  source 1..22: mol_type = other RNA
ggagaattttggttgggcctag

SEQ ID NO: 13827 - RNA, 22 nt, synthetic construct
  source 1..22: mol_type = other RNA
ggagtatatcttctctaggccc

SEQ ID NO: 13828 - RNA, 22 nt, synthetic construct
  source 1..22: mol_type = other RNA
ggatcacaaagcaaaaggacac

SEQ ID NO: 13829 - RNA, 22 nt, synthetic construct
  source 1..22: mol_type = other RNA
ggattgcattggggacattgcc

SEQ ID NO: 13830 - RNA, 22 nt, synthetic construct
  source 1..22: mol_type = other RNA
ggcaatgtccccaatgcaatcc

SEQ ID NO: 13831 - RNA, 22 nt, synthetic construct
  source 1..22: mol_type = other RNA
ggcccaaccaaaattctcctga

SEQ ID NO: 13832 - RNA, 22 nt, synthetic construct
  source 1..22: mol_type = other RNA
ggcctagagaagatatactcca

SEQ ID NO: 13833 - RNA, 22 nt, synthetic construct
  source 1..22: mol_type = other RNA
gggaaatcacgaaaccaactat

SEQ ID NO: 13834 - RNA, 22 nt, synthetic construct
  source 1..22: mol_type = other RNA
gggacattgccagtaatcgcaa

SEQ ID NO: 13835 - RNA, 22 nt, synthetic construct
  source 1..22: mol_type = other RNA
gggatcacaaagcaaaaggaca

SEQ ID NO: 13836 - RNA, 22 nt, synthetic construct
  source 1..22: mol_type = other RNA
gggattgcattggggacattgc

SEQ ID NO: 13837 - RNA, 22 nt, synthetic construct
  source 1..22: mol_type = other RNA
gggcctagagaagatatactcc

SEQ ID NO: 13838 - RNA, 22 nt, synthetic construct
  source 1..22: mol_type = other RNA
ggggacattgccagtaatcgca

SEQ ID NO: 13839 - RNA, 22 nt, synthetic construct
  source 1..22: mol_type = other RNA
gggttattcaggtatctttttc

SEQ ID NO: 13840 - RNA, 22 nt, synthetic construct
  source 1..22: mol_type = other RNA
ggtatcagaaaaagatacctga

SEQ ID NO: 13841 - RNA, 22 nt, synthetic construct
  source 1..22: mol_type = other RNA
ggtatctttttctgataccaat

SEQ ID NO: 13842 - RNA, 22 nt, synthetic construct
  source 1..22: mol_type = other RNA
ggtgttttctacttgggatcac

SEQ ID NO: 13843 - RNA, 22 nt, synthetic construct
  source 1..22: mol_type = other RNA
ggttattcaggtatctttttct

SEQ ID NO: 13844 - RNA, 22 nt, synthetic construct
  source 1..22: mol_type = other RNA
ggttgggcctagagaagatata

SEQ ID NO: 13845 - RNA, 22 nt, synthetic construct
  source 1..22: mol_type = other RNA
ggtttcgtgatttcccaagtaa

SEQ ID NO: 13846 - RNA, 22 nt, synthetic construct
  source 1..22: mol_type = other RNA
gtaaaacataattagattgctt

SEQ ID NO: 13847 - RNA, 22 nt, synthetic construct
  source 1..22: mol_type = other RNA
gtaatcgcaactagatgtagcg

SEQ ID NO: 13848 - RNA, 22 nt, synthetic construct
  source 1..22: mol_type = other RNA
gtagaaaacaccaaatctttgt

SEQ ID NO: 13849 - RNA, 22 nt, synthetic construct
  source 1..22: mol_type = other RNA
gtagcgtatagttggtttcgtg

SEQ ID NO: 13850 - RNA, 22 nt, synthetic construct
  source 1..22: mol_type = other RNA
gtatagttggtttcgtgatttc

SEQ ID NO: 13851 - RNA, 22 nt, synthetic construct
  source 1..22: mol_type = other RNA
gtatatcttctctaggcccaac

SEQ ID NO: 13852 - RNA, 22 nt, synthetic construct
  source 1..22: mol_type = other RNA
gtatcagaaaaagatacctgaa

SEQ ID NO: 13853 - RNA, 22 nt, synthetic construct
  source 1..22: mol_type = other RNA
gtatctttttctgataccaata

SEQ ID NO: 13854 - RNA, 22 nt, synthetic construct
  source 1..22: mol_type = other RNA
gtattggtatcagaaaaagata

SEQ ID NO: 13855 - RNA, 22 nt, synthetic construct
  source 1..22: mol_type = other RNA
gtccagagggttattcaggtat

SEQ ID NO: 13856 - RNA, 22 nt, synthetic construct
  source 1..22: mol_type = other RNA
gtccccaatgcaatcccggaaa

SEQ ID NO: 13857 - RNA, 22 nt, synthetic construct
  source 1..22: mol_type = other RNA
gtccttttgctttgtgatccca

SEQ ID NO: 13858 - RNA, 22 nt, synthetic construct
  source 1..22: mol_type = other RNA
gtcttccaactcaattcgtaaa

SEQ ID NO: 13859 - RNA, 22 nt, synthetic construct
  source 1..22: mol_type = other RNA
gtctttccagtcttccaactca

SEQ ID NO: 13860 - RNA, 22 nt, synthetic construct
  source 1..22: mol_type = other RNA
gtgaagcaatctaattatgttt

SEQ ID NO: 13861 - RNA, 22 nt, synthetic construct
  source 1..22: mol_type = other RNA
gtgatcccaagtagaaaacacc

SEQ ID NO: 13862 - RNA, 22 nt, synthetic construct
  source 1..22: mol_type = other RNA
gtgatttcccaagtaaaaagaa

SEQ ID NO: 13863 - RNA, 22 nt, synthetic construct
  source 1..22: mol_type = other RNA
gtgtccttttgctttgtgatcc

SEQ ID NO: 13864 - RNA, 22 nt, synthetic construct
  source 1..22: mol_type = other RNA
gtgttttctacttgggatcaca

SEQ ID NO: 13865 - RNA, 22 nt, synthetic construct
  source 1..22: mol_type = other RNA
gttattcaggtatctttttctg

SEQ ID NO: 13866 - RNA, 22 nt, synthetic construct
  source 1..22: mol_type = other RNA
gttgaagtgtccttttgctttg

SEQ ID NO: 13867 - RNA, 22 nt, synthetic construct
  source 1..22: mol_type = other RNA
gttgcgattactggcaatgtcc

SEQ ID NO: 13868 - RNA, 22 nt, synthetic construct
  source 1..22: mol_type = other RNA
gttggaagactggaaagacaac

SEQ ID NO: 13869 - RNA, 22 nt, synthetic construct
  source 1..22: mol_type = other RNA
gttgggcctagagaagatatac

SEQ ID NO: 13870 - RNA, 22 nt, synthetic construct
  source 1..22: mol_type = other RNA
gttggtttcgtgatttcccaag

SEQ ID NO: 13871 - RNA, 22 nt, synthetic construct
  source 1..22: mol_type = other RNA
gttgtctttccagtcttccaac

SEQ ID NO: 13872 - RNA, 22 nt, synthetic construct
  source 1..22: mol_type = other RNA
gtttcgtgatttcccaagtaaa

SEQ ID NO: 13873 - RNA, 22 nt, synthetic construct
  source 1..22: mol_type = other RNA
gtttgttgtctttccagtcttc

SEQ ID NO: 13874 - RNA, 22 nt, synthetic construct
  source 1..22: mol_type = other RNA
gttttacgaattgagttggaag

SEQ ID NO: 13875 - RNA, 22 nt, synthetic construct
  source 1..22: mol_type = other RNA
gttttccgggattgcattgggg

SEQ ID NO: 13876 - RNA, 22 nt, synthetic construct
  source 1..22: mol_type = other RNA
gttttctacttgggatcacaaa

SEQ ID NO: 13877 - RNA, 22 nt, synthetic construct
  source 1..22: mol_type = other RNA
taaaacataattagattgcttc

SEQ ID NO: 13878 - RNA, 22 nt, synthetic construct
  source 1..22: mol_type = other RNA
taaaacttttcttttcaggaga

SEQ ID NO: 13879 - RNA, 22 nt, synthetic construct
  source 1..22: mol_type = other RNA
taaagtattggtatcagaaaaa

SEQ ID NO: 13880 - RNA, 22 nt, synthetic construct
  source 1..22: mol_type = other RNA
taaccctctggacagttgaagt

SEQ ID NO: 13881 - RNA, 22 nt, synthetic construct
  source 1..22: mol_type = other RNA
taatcgcaactagatgtagcgt

SEQ ID NO: 13882 - RNA, 22 nt, synthetic construct
  source 1..22: mol_type = other RNA
taatgtttgttgtctttccagt

SEQ ID NO: 13883 - RNA, 22 nt, synthetic construct
  source 1..22: mol_type = other RNA
taattagattgcttcactatgg

SEQ ID NO: 13884 - RNA, 22 nt, synthetic construct
  source 1..22: mol_type = other RNA
taattatgttttacgaattgag

SEQ ID NO: 13885 - RNA, 22 nt, synthetic construct
  source 1..22: mol_type = other RNA
tacatctagttgcgattactgg

SEQ ID NO: 13886 - RNA, 22 nt, synthetic construct
  source 1..22: mol_type = other RNA
tacctgaataaccctctggaca

SEQ ID NO: 13887 - RNA, 22 nt, synthetic construct
  source 1..22: mol_type = other RNA
tacgaattgagttggaagactg

SEQ ID NO: 13888 - RNA, 22 nt, synthetic construct
  source 1..22: mol_type = other RNA
tacgctacatctagttgcgatt

SEQ ID NO: 13889 - RNA, 22 nt, synthetic construct
  source 1..22: mol_type = other RNA
tactccatagtgaagcaatcta

SEQ ID NO: 13890 - RNA, 22 nt, synthetic construct
  source 1..22: mol_type = other RNA
tactggcaatgtccccaatgca

SEQ ID NO: 13891 - RNA, 22 nt, synthetic construct
  source 1..22: mol_type = other RNA
tacttgggaaatcacgaaacca

SEQ ID NO: 13892 - RNA, 22 nt, synthetic construct
  source 1..22: mol_type = other RNA
tacttgggatcacaaagcaaaa

SEQ ID NO: 13893 - RNA, 22 nt, synthetic construct
  source 1..22: mol_type = other RNA
tagaaaacaccaaatctttgtt

SEQ ID NO: 13894 - RNA, 22 nt, synthetic construct
  source 1..22: mol_type = other RNA
tagagaagatatactccatagt

SEQ ID NO: 13895 - RNA, 22 nt, synthetic construct
  source 1..22: mol_type = other RNA
tagatgtagcgtatagttggtt

SEQ ID NO: 13896 - RNA, 22 nt, synthetic construct
  source 1..22: mol_type = other RNA
tagattgcttcactatggagta

SEQ ID NO: 13897 - RNA, 22 nt, synthetic construct
  source 1..22: mol_type = other RNA
tagcgtatagttggtttcgtga

SEQ ID NO: 13898 - RNA, 22 nt, synthetic construct
  source 1..22: mol_type = other RNA
taggcccaaccaaaattctcct

SEQ ID NO: 13899 - RNA, 22 nt, synthetic construct
  source 1..22: mol_type = other RNA
tagtgaagcaatctaattatgt

SEQ ID NO: 13900 - RNA, 22 nt, synthetic construct
  source 1..22: mol_type = other RNA
tagttgcgattactggcaatgt

SEQ ID NO: 13901 - RNA, 22 nt, synthetic construct
  source 1..22: mol_type = other RNA
tagttggtttcgtgatttccca

SEQ ID NO: 13902 - RNA, 22 nt, synthetic construct
  source 1..22: mol_type = other RNA
tataatgtttgttgtctttcca

SEQ ID NO: 13903 - RNA, 22 nt, synthetic construct
  source 1..22: mol_type = other RNA
tatacgctacatctagttgcga

SEQ ID NO: 13904 - RNA, 22 nt, synthetic construct
  source 1..22: mol_type = other RNA
tatactccatagtgaagcaatc

SEQ ID NO: 13905 - RNA, 22 nt, synthetic construct
  source 1..22: mol_type = other RNA
tatagttggtttcgtgatttcc

SEQ ID NO: 13906 - RNA, 22 nt, synthetic construct
  source 1..22: mol_type = other RNA
tatatcttctctaggcccaacc

SEQ ID NO: 13907 - RNA, 22 nt, synthetic construct
  source 1..22: mol_type = other RNA
tatcagaaaaagatacctgaat

SEQ ID NO: 13908 - RNA, 22 nt, synthetic construct
  source 1..22: mol_type = other RNA
tatcttctctaggcccaaccaa

SEQ ID NO: 13909 - RNA, 22 nt, synthetic construct
  source 1..22: mol_type = other RNA
tatggagtatatcttctctagg

SEQ ID NO: 13910 - RNA, 22 nt, synthetic construct
  source 1..22: mol_type = other RNA
tatgttttacgaattgagttgg

SEQ ID NO: 13911 - RNA, 22 nt, synthetic construct
  source 1..22: mol_type = other RNA
tattcaggtatctttttctgat

SEQ ID NO: 13912 - RNA, 22 nt, synthetic construct
  source 1..22: mol_type = other RNA
tattctttttacttgggaaatc

SEQ ID NO: 13913 - RNA, 22 nt, synthetic construct
  source 1..22: mol_type = other RNA
tattggtatcagaaaaagatac

SEQ ID NO: 13914 - RNA, 22 nt, synthetic construct
  source 1..22: mol_type = other RNA
tcaactgtccagagggttattc

SEQ ID NO: 13915 - RNA, 22 nt, synthetic construct
  source 1..22: mol_type = other RNA
tcaatataatgtttgttgtctt

SEQ ID NO: 13916 - RNA, 22 nt, synthetic construct
  source 1..22: mol_type = other RNA
tcaattcgtaaaacataattag

SEQ ID NO: 13917 - RNA, 22 nt, synthetic construct
  source 1..22: mol_type = other RNA
tcacaaagcaaaaggacacttc

SEQ ID NO: 13918 - RNA, 22 nt, synthetic construct
  source 1..22: mol_type = other RNA
tcacagatttttaaaacttttc

SEQ ID NO: 13919 - RNA, 22 nt, synthetic construct
  source 1..22: mol_type = other RNA
tcacgaaaccaactatacgcta

SEQ ID NO: 13920 - RNA, 22 nt, synthetic construct
  source 1..22: mol_type = other RNA
tcactatggagtatatcttctc

SEQ ID NO: 13921 - RNA, 22 nt, synthetic construct
  source 1..22: mol_type = other RNA
tcagaaaaagatacctgaataa

SEQ ID NO: 13922 - RNA, 22 nt, synthetic construct
  source 1..22: mol_type = other RNA
tcaggagaattttggttgggcc

SEQ ID NO: 13923 - RNA, 22 nt, synthetic construct
  source 1..22: mol_type = other RNA
tcaggtatctttttctgatacc

SEQ ID NO: 13924 - RNA, 22 nt, synthetic construct
  source 1..22: mol_type = other RNA
tccaactcaattcgtaaaacat

SEQ ID NO: 13925 - RNA, 22 nt, synthetic construct
  source 1..22: mol_type = other RNA
tccagagggttattcaggtatc

SEQ ID NO: 13926 - RNA, 22 nt, synthetic construct
  source 1..22: mol_type = other RNA
tccagtcttccaactcaattcg

SEQ ID NO: 13927 - RNA, 22 nt, synthetic construct
  source 1..22: mol_type = other RNA
tccatagtgaagcaatctaatt

SEQ ID NO: 13928 - RNA, 22 nt, synthetic construct
  source 1..22: mol_type = other RNA
tcccaagtaaaaagaatattca

SEQ ID NO: 13929 - RNA, 22 nt, synthetic construct
  source 1..22: mol_type = other RNA
tcccaagtagaaaacaccaaat

SEQ ID NO: 13930 - RNA, 22 nt, synthetic construct
  source 1..22: mol_type = other RNA
tccccaatgcaatcccggaaaa

SEQ ID NO: 13931 - RNA, 22 nt, synthetic construct
  source 1..22: mol_type = other RNA
tcccggaaaacaaagatttggt

SEQ ID NO: 13932 - RNA, 22 nt, synthetic construct
  source 1..22: mol_type = other RNA
tccgggattgcattggggacat

SEQ ID NO: 13933 - RNA, 22 nt, synthetic construct
  source 1..22: mol_type = other RNA
tcctgaaaagaaaagttttaaa

SEQ ID NO: 13934 - RNA, 22 nt, synthetic construct
  source 1..22: mol_type = other RNA
tccttttgctttgtgatcccaa

SEQ ID NO: 13935 - RNA, 22 nt, synthetic construct
  source 1..22: mol_type = other RNA
tcgcaactagatgtagcgtata

SEQ ID NO: 13936 - RNA, 22 nt, synthetic construct
  source 1..22: mol_type = other RNA
tcgtaaaacataattagattgc

SEQ ID NO: 13937 - RNA, 22 nt, synthetic construct
  source 1..22: mol_type = other RNA
tcgtgatttcccaagtaaaaag

SEQ ID NO: 13938 - RNA, 22 nt, synthetic construct
  source 1..22: mol_type = other RNA
tctaattatgttttacgaattg

SEQ ID NO: 13939 - RNA, 22 nt, synthetic construct
  source 1..22: mol_type = other RNA
tctacttgggatcacaaagcaa

SEQ ID NO: 13940 - RNA, 22 nt, synthetic construct
  source 1..22: mol_type = other RNA
tctaggcccaaccaaaattctc

SEQ ID NO: 13941 - RNA, 22 nt, synthetic construct
  source 1..22: mol_type = other RNA
tctagttgcgattactggcaat

SEQ ID NO: 13942 - RNA, 22 nt, synthetic construct
  source 1..22: mol_type = other RNA
tctcctgaaaagaaaagtttta

SEQ ID NO: 13943 - RNA, 22 nt, synthetic construct
  source 1..22: mol_type = other RNA
tctctaggcccaaccaaaattc

SEQ ID NO: 13944 - RNA, 22 nt, synthetic construct
  source 1..22: mol_type = other RNA
tctggacagttgaagtgtcctt

SEQ ID NO: 13945 - RNA, 22 nt, synthetic construct
  source 1..22: mol_type = other RNA
tcttccaactcaattcgtaaaa

SEQ ID NO: 13946 - RNA, 22 nt, synthetic construct
  source 1..22: mol_type = other RNA
tcttctctaggcccaaccaaaa

SEQ ID NO: 13947 - RNA, 22 nt, synthetic construct
  source 1..22: mol_type = other RNA
tctttccagtcttccaactcaa

SEQ ID NO: 13948 - RNA, 22 nt, synthetic construct
  source 1..22: mol_type = other RNA
tctttgttttccgggattgcat

SEQ ID NO: 13949 - RNA, 22 nt, synthetic construct
  source 1..22: mol_type = other RNA
tcttttcaggagaattttggtt

SEQ ID NO: 13950 - RNA, 22 nt, synthetic construct
  source 1..22: mol_type = other RNA
tctttttacttgggaaatcacg

SEQ ID NO: 13951 - RNA, 22 nt, synthetic construct
  source 1..22: mol_type = other RNA
tgaagcaatctaattatgtttt

SEQ ID NO: 13952 - RNA, 22 nt, synthetic construct
  source 1..22: mol_type = other RNA
tgaagtgtccttttgctttgtg

SEQ ID NO: 13953 - RNA, 22 nt, synthetic construct
  source 1..22: mol_type = other RNA
tgaataaccctctggacagttg

SEQ ID NO: 13954 - RNA, 22 nt, synthetic construct
  source 1..22: mol_type = other RNA
tgaatattctttttacttggga

SEQ ID NO: 13955 - RNA, 22 nt, synthetic construct
  source 1..22: mol_type = other RNA
tgagttggaagactggaaagac

SEQ ID NO: 13956 - RNA, 22 nt, synthetic construct
  source 1..22: mol_type = other RNA
tgatcccaagtagaaaacacca

SEQ ID NO: 13957 - RNA, 22 nt, synthetic construct
  source 1..22: mol_type = other RNA
tgatttcccaagtaaaaagaat

SEQ ID NO: 13958 - RNA, 22 nt, synthetic construct
  source 1..22: mol_type = other RNA
tgcaatcccggaaaacaaagat

SEQ ID NO: 13959 - RNA, 22 nt, synthetic construct
  source 1..22: mol_type = other RNA
tgcattggggacattgccagta

SEQ ID NO: 13960 - RNA, 22 nt, synthetic construct
  source 1..22: mol_type = other RNA
tgccagtaatcgcaactagatg

SEQ ID NO: 13961 - RNA, 22 nt, synthetic construct
  source 1..22: mol_type = other RNA
tgcgattactggcaatgtcccc

SEQ ID NO: 13962 - RNA, 22 nt, synthetic construct
  source 1..22: mol_type = other RNA
tgcttcactatggagtatatct

SEQ ID NO: 13963 - RNA, 22 nt, synthetic construct
  source 1..22: mol_type = other RNA
tgctttgtgatcccaagtagaa

SEQ ID NO: 13964 - RNA, 22 nt, synthetic construct
  source 1..22: mol_type = other RNA
tggaaagacaacaaacattata

SEQ ID NO: 13965 - RNA, 22 nt, synthetic construct
  source 1..22: mol_type = other RNA
tggaagactggaaagacaacaa

SEQ ID NO: 13966 - RNA, 22 nt, synthetic construct
  source 1..22: mol_type = other RNA
tggacagttgaagtgtcctttt

SEQ ID NO: 13967 - RNA, 22 nt, synthetic construct
  source 1..22: mol_type = other RNA
tggagtatatcttctctaggcc

SEQ ID NO: 13968 - RNA, 22 nt, synthetic construct
  source 1..22: mol_type = other RNA
tggcaatgtccccaatgcaatc

SEQ ID NO: 13969 - RNA, 22 nt, synthetic construct
  source 1..22: mol_type = other RNA
tgggaaatcacgaaaccaacta

SEQ ID NO: 13970 - RNA, 22 nt, synthetic construct
  source 1..22: mol_type = other RNA
tgggatcacaaagcaaaaggac

SEQ ID NO: 13971 - RNA, 22 nt, synthetic construct
  source 1..22: mol_type = other RNA
tgggcctagagaagatatactc

SEQ ID NO: 13972 - RNA, 22 nt, synthetic construct
  source 1..22: mol_type = other RNA
tggggacattgccagtaatcgc

SEQ ID NO: 13973 - RNA, 22 nt, synthetic construct
  source 1..22: mol_type = other RNA
tggtatcagaaaaagatacctg

SEQ ID NO: 13974 - RNA, 22 nt, synthetic construct
  source 1..22: mol_type = other RNA
tggtgttttctacttgggatca

SEQ ID NO: 13975 - RNA, 22 nt, synthetic construct
  source 1..22: mol_type = other RNA
tggttgggcctagagaagatat

SEQ ID NO: 13976 - RNA, 22 nt, synthetic construct
  source 1..22: mol_type = other RNA
tggtttcgtgatttcccaagta

SEQ ID NO: 13977 - RNA, 22 nt, synthetic construct
  source 1..22: mol_type = other RNA
tgtagcgtatagttggtttcgt

SEQ ID NO: 13978 - RNA, 22 nt, synthetic construct
  source 1..22: mol_type = other RNA
tgtccagagggttattcaggta

SEQ ID NO: 13979 - RNA, 22 nt, synthetic construct
  source 1..22: mol_type = other RNA
tgtccccaatgcaatcccggaa

SEQ ID NO: 13980 - RNA, 22 nt, synthetic construct
  source 1..22: mol_type = other RNA
tgtccttttgctttgtgatccc

SEQ ID NO: 13981 - RNA, 22 nt, synthetic construct
  source 1..22: mol_type = other RNA
tgtctttccagtcttccaactc

SEQ ID NO: 13982 - RNA, 22 nt, synthetic construct
  source 1..22: mol_type = other RNA
tgtgatcccaagtagaaaacac

SEQ ID NO: 13983 - RNA, 22 nt, synthetic construct
  source 1..22: mol_type = other RNA
tgttgtctttccagtcttccaa

SEQ ID NO: 13984 - RNA, 22 nt, synthetic construct
  source 1..22: mol_type = other RNA
tgtttgttgtctttccagtctt

SEQ ID NO: 13985 - RNA, 22 nt, synthetic construct
  source 1..22: mol_type = other RNA
tgttttacgaattgagttggaa

SEQ ID NO: 13986 - RNA, 22 nt, synthetic construct
  source 1..22: mol_type = other RNA
tgttttccgggattgcattggg

SEQ ID NO: 13987 - RNA, 22 nt, synthetic construct
  source 1..22: mol_type = other RNA
tgttttctacttgggatcacaa

SEQ ID NO: 13988 - RNA, 22 nt, synthetic construct
  source 1..22: mol_type = other RNA
ttaaaacttttcttttcaggag

SEQ ID NO: 13989 - RNA, 22 nt, synthetic construct
  source 1..22: mol_type = other RNA
ttacgaattgagttggaagact

SEQ ID NO: 13990 - RNA, 22 nt, synthetic construct
  source 1..22: mol_type = other RNA
ttactggcaatgtccccaatgc

SEQ ID NO: 13991 - RNA, 22 nt, synthetic construct
  source 1..22: mol_type = other RNA
ttacttgggaaatcacgaaacc

SEQ ID NO: 13992 - RNA, 22 nt, synthetic construct
  source 1..22: mol_type = other RNA
ttagattgcttcactatggagt

SEQ ID NO: 13993 - RNA, 22 nt, synthetic construct
  source 1..22: mol_type = other RNA
ttatgttttacgaattgagttg

SEQ ID NO: 13994 - RNA, 22 nt, synthetic construct
  source 1..22: mol_type = other RNA
ttattcaggtatctttttctga

SEQ ID NO: 13995 - RNA, 22 nt, synthetic construct
  source 1..22: mol_type = other RNA
ttcaactgtccagagggttatt

SEQ ID NO: 13996 - RNA, 22 nt, synthetic construct
  source 1..22: mol_type = other RNA
ttcaatataatgtttgttgtct

SEQ ID NO: 13997 - RNA, 22 nt, synthetic construct
  source 1..22: mol_type = other RNA
ttcactatggagtatatcttct

SEQ ID NO: 13998 - RNA, 22 nt, synthetic construct
  source 1..22: mol_type = other RNA
ttcaggagaattttggttgggc

SEQ ID NO: 13999 - RNA, 22 nt, synthetic construct
  source 1..22: mol_type = other RNA
ttcaggtatctttttctgatac

SEQ ID NO: 14000 - RNA, 22 nt, synthetic construct
  source 1..22: mol_type = other RNA
ttccaactcaattcgtaaaaca

SEQ ID NO: 14001 - RNA, 22 nt, synthetic construct
  source 1..22: mol_type = other RNA
ttccagtcttccaactcaattc

SEQ ID NO: 14002 - RNA, 22 nt, synthetic construct
  source 1..22: mol_type = other RNA
ttcccaagtaaaaagaatattc

SEQ ID NO: 14003 - RNA, 22 nt, synthetic construct
  source 1..22: mol_type = other RNA
ttccgggattgcattggggaca

SEQ ID NO: 14004 - RNA, 22 nt, synthetic construct
  source 1..22: mol_type = other RNA
ttcgtaaaacataattagattg

SEQ ID NO: 14005 - RNA, 22 nt, synthetic construct
  source 1..22: mol_type = other RNA
ttcgtgatttcccaagtaaaaa

SEQ ID NO: 14006 - RNA, 22 nt, synthetic construct
  source 1..22: mol_type = other RNA
ttctacttgggatcacaaagca

SEQ ID NO: 14007 - RNA, 22 nt, synthetic construct
  source 1..22: mol_type = other RNA
ttctcctgaaaagaaaagtttt

SEQ ID NO: 14008 - RNA, 22 nt, synthetic construct
  source 1..22: mol_type = other RNA
ttctctaggcccaaccaaaatt

SEQ ID NO: 14009 - RNA, 22 nt, synthetic construct
  source 1..22: mol_type = other RNA
ttcttttcaggagaattttggt

SEQ ID NO: 14010 - RNA, 22 nt, synthetic construct
  source 1..22: mol_type = other RNA
ttctttttacttgggaaatcac

SEQ ID NO: 14011 - RNA, 22 nt, synthetic construct
  source 1..22: mol_type = other RNA
ttgaagtgtccttttgctttgt

SEQ ID NO: 14012 - RNA, 22 nt, synthetic construct
  source 1..22: mol_type = other RNA
ttgaatattctttttacttggg

SEQ ID NO: 14013 - RNA, 22 nt, synthetic construct
  source 1..22: mol_type = other RNA
ttgagttggaagactggaaaga

SEQ ID NO: 14014 - RNA, 22 nt, synthetic construct
  source 1..22: mol_type = other RNA
ttgcattggggacattgccagt

SEQ ID NO: 14015 - RNA, 22 nt, synthetic construct
  source 1..22: mol_type = other RNA
ttgccagtaatcgcaactagat

SEQ ID NO: 14016 - RNA, 22 nt, synthetic construct
  source 1..22: mol_type = other RNA
ttgcgattactggcaatgtccc

SEQ ID NO: 14017 - RNA, 22 nt, synthetic construct
  source 1..22: mol_type = other RNA
ttgcttcactatggagtatatc

SEQ ID NO: 14018 - RNA, 22 nt, synthetic construct
  source 1..22: mol_type = other RNA
ttgctttgtgatcccaagtaga

SEQ ID NO: 14019 - RNA, 22 nt, synthetic construct
  source 1..22: mol_type = other RNA
ttggaagactggaaagacaaca

SEQ ID NO: 14020 - RNA, 22 nt, synthetic construct
  source 1..22: mol_type = other RNA
ttgggaaatcacgaaaccaact

SEQ ID NO: 14021 - RNA, 22 nt, synthetic construct
  source 1..22: mol_type = other RNA
ttgggatcacaaagcaaaagga

SEQ ID NO: 14022 - RNA, 22 nt, synthetic construct
  source 1..22: mol_type = other RNA
ttgggcctagagaagatatact

SEQ ID NO: 14023 - RNA, 22 nt, synthetic construct
  source 1..22: mol_type = other RNA
ttggggacattgccagtaatcg

SEQ ID NO: 14024 - RNA, 22 nt, synthetic construct
  source 1..22: mol_type = other RNA
ttggtatcagaaaaagatacct

SEQ ID NO: 14025 - RNA, 22 nt, synthetic construct
  source 1..22: mol_type = other RNA
ttggtgttttctacttgggatc

SEQ ID NO: 14026 - RNA, 22 nt, synthetic construct
  source 1..22: mol_type = other RNA
ttggttgggcctagagaagata

SEQ ID NO: 14027 - RNA, 22 nt, synthetic construct
  source 1..22: mol_type = other RNA
ttggtttcgtgatttcccaagt

SEQ ID NO: 14028 - RNA, 22 nt, synthetic construct
  source 1..22: mol_type = other RNA
ttgtctttccagtcttccaact

SEQ ID NO: 14029 - RNA, 22 nt, synthetic construct
  source 1..22: mol_type = other RNA
ttgtgatcccaagtagaaaaca

SEQ ID NO: 14030 - RNA, 22 nt, synthetic construct
  source 1..22: mol_type = other RNA
ttgttgtctttccagtcttcca

SEQ ID NO: 14031 - RNA, 22 nt, synthetic construct
  source 1..22: mol_type = other RNA
ttgttttccgggattgcattgg

SEQ ID NO: 14032 - RNA, 22 nt, synthetic construct
  source 1..22: mol_type = other RNA
tttaaaacttttcttttcagga

SEQ ID NO: 14033 - RNA, 22 nt, synthetic construct
  source 1..22: mol_type = other RNA
tttacgaattgagttggaagac

SEQ ID NO: 14034 - RNA, 22 nt, synthetic construct
  source 1..22: mol_type = other RNA
tttacttgggaaatcacgaaac

SEQ ID NO: 14035 - RNA, 22 nt, synthetic construct
  source 1..22: mol_type = other RNA
tttcaggagaattttggttggg

SEQ ID NO: 14036 - RNA, 22 nt, synthetic construct
  source 1..22: mol_type = other RNA
tttccagtcttccaactcaatt

SEQ ID NO: 14037 - RNA, 22 nt, synthetic construct
  source 1..22: mol_type = other RNA
tttcccaagtaaaaagaatatt

SEQ ID NO: 14038 - RNA, 22 nt, synthetic construct
  source 1..22: mol_type = other RNA
tttccgggattgcattggggac

SEQ ID NO: 14039 - RNA, 22 nt, synthetic construct
  source 1..22: mol_type = other RNA
tttcgtgatttcccaagtaaaa

SEQ ID NO: 14040 - RNA, 22 nt, synthetic construct
  source 1..22: mol_type = other RNA
tttctacttgggatcacaaagc

SEQ ID NO: 14041 - RNA, 22 nt, synthetic construct
  source 1..22: mol_type = other RNA
tttcttttcaggagaattttgg

SEQ ID NO: 14042 - RNA, 22 nt, synthetic construct
  source 1..22: mol_type = other RNA
tttgctttgtgatcccaagtag

SEQ ID NO: 14043 - RNA, 22 nt, synthetic construct
  source 1..22: mol_type = other RNA
tttggtgttttctacttgggat

SEQ ID NO: 14044 - RNA, 22 nt, synthetic construct
  source 1..22: mol_type = other RNA
tttggttgggcctagagaagat

SEQ ID NO: 14045 - RNA, 22 nt, synthetic construct
  source 1..22: mol_type = other RNA
tttgtgatcccaagtagaaaac

SEQ ID NO: 14046 - RNA, 22 nt, synthetic construct
  source 1..22: mol_type = other RNA
tttgttgtctttccagtcttcc

SEQ ID NO: 14047 - RNA, 22 nt, synthetic construct
  source 1..22: mol_type = other RNA
tttgttttccgggattgcattg

SEQ ID NO: 14048 - RNA, 22 nt, synthetic construct
  source 1..22: mol_type = other RNA
ttttaaaacttttcttttcagg

SEQ ID NO: 14049 - RNA, 22 nt, synthetic construct
  source 1..22: mol_type = other RNA
ttttacgaattgagttggaaga

SEQ ID NO: 14050 - RNA, 22 nt, synthetic construct
  source 1..22: mol_type = other RNA
ttttacttgggaaatcacgaaa

SEQ ID NO: 14051 - RNA, 22 nt, synthetic construct
  source 1..22: mol_type = other RNA
ttttcaggagaattttggttgg

SEQ ID NO: 14052 - RNA, 22 nt, synthetic construct
  source 1..22: mol_type = other RNA
ttttccgggattgcattgggga

SEQ ID NO: 14053 - RNA, 22 nt, synthetic construct
  source 1..22: mol_type = other RNA
ttttctacttgggatcacaaag

SEQ ID NO: 14054 - RNA, 22 nt, synthetic construct
  source 1..22: mol_type = other RNA
ttttcttttcaggagaattttg

SEQ ID NO: 14055 - RNA, 22 nt, synthetic construct
  source 1..22: mol_type = other RNA
ttttgctttgtgatcccaagta

SEQ ID NO: 14056 - RNA, 22 nt, synthetic construct
  source 1..22: mol_type = other RNA
ttttggttgggcctagagaaga

SEQ ID NO: 14057 - RNA, 22 nt, synthetic construct
  source 1..22: mol_type = other RNA
tttttacttgggaaatcacgaa

SEQ ID NO: 14058 - RNA, 20 nt, synthetic construct
  source 1..20: mol_type = other RNA
aaaacaacctaaatggtaaa

SEQ ID NO: 14059 - RNA, 20 nt, synthetic construct
  source 1..20: mol_type = other RNA
aaaatcaaccaaaatgttga

SEQ ID NO: 14060 - RNA, 20 nt, synthetic construct
  source 1..20: mol_type = other RNA
aaaatctaagccagagagga

SEQ ID NO: 14061 - RNA, 20 nt, synthetic construct
  source 1..20: mol_type = other RNA
aaaatggaaggttatactct

SEQ ID NO: 14062 - RNA, 20 nt, synthetic construct
  source 1..20: mol_type = other RNA
aaaatgttgatccatccaac

SEQ ID NO: 14063 - RNA, 20 nt, synthetic construct
  source 1..20: mol_type = other RNA
aaacaacctaaatggtaaat

SEQ ID NO: 14064 - RNA, 20 nt, synthetic construct
  source 1..20: mol_type = other RNA
aaaccaagagcaaaatctaa

SEQ ID NO: 14065 - RNA, 20 nt, synthetic construct
  source 1..20: mol_type = other RNA
aaagctttctgaatctgttg

SEQ ID NO: 14066 - RNA, 20 nt, synthetic construct
  source 1..20: mol_type = other RNA
aaagctttgaatgaactgag

SEQ ID NO: 14067 - RNA, 20 nt, synthetic construct
  source 1..20: mol_type = other RNA
aaaggagatagatatgcaat

SEQ ID NO: 14068 - RNA, 20 nt, synthetic construct
  source 1..20: mol_type = other RNA
aaatataacaaaccaagagc

SEQ ID NO: 14069 - RNA, 20 nt, synthetic construct
  source 1..20: mol_type = other RNA
aaatcaaccaaaatgttgat

SEQ ID NO: 14070 - RNA, 20 nt, synthetic construct
  source 1..20: mol_type = other RNA
aaatctaagccagagaggag

SEQ ID NO: 14071 - RNA, 20 nt, synthetic construct
  source 1..20: mol_type = other RNA
aaatggaaggttatactcta

SEQ ID NO: 14072 - RNA, 20 nt, synthetic construct
  source 1..20: mol_type = other RNA
aaatggtaaatataacaaac

SEQ ID NO: 14073 - RNA, 20 nt, synthetic construct
  source 1..20: mol_type = other RNA
aaatgttgatccatccaaca

SEQ ID NO: 14074 - RNA, 20 nt, synthetic construct
  source 1..20: mol_type = other RNA
aaattgcatatctatctcct

SEQ ID NO: 14075 - RNA, 20 nt, synthetic construct
  source 1..20: mol_type = other RNA
aaatttgcctcagttcattc

SEQ ID NO: 14076 - RNA, 20 nt, synthetic construct
  source 1..20: mol_type = other RNA
aacaaaccaagagcaaaatc

SEQ ID NO: 14077 - RNA, 20 nt, synthetic construct
  source 1..20: mol_type = other RNA
aacaacctaaatggtaaata

SEQ ID NO: 14078 - RNA, 20 nt, synthetic construct
  source 1..20: mol_type = other RNA
aacagattcagaaagctttg

SEQ ID NO: 14079 - RNA, 20 nt, synthetic construct
  source 1..20: mol_type = other RNA
aacattttggttgattttat

SEQ ID NO: 14080 - RNA, 20 nt, synthetic construct
  source 1..20: mol_type = other RNA
aaccaaaatgttgatccatc

SEQ ID NO: 14081 - RNA, 20 nt, synthetic construct
  source 1..20: mol_type = other RNA
aaccaagagcaaaatctaag

SEQ ID NO: 14082 - RNA, 20 nt, synthetic construct
  source 1..20: mol_type = other RNA
aacctaaatggtaaatataa

SEQ ID NO: 14083 - RNA, 20 nt, synthetic construct
  source 1..20: mol_type = other RNA
aaccttccattttgagactt

SEQ ID NO: 14084 - RNA, 20 nt, synthetic construct
  source 1..20: mol_type = other RNA
aagagcaaaatctaagccag

SEQ ID NO: 14085 - RNA, 20 nt, synthetic construct
  source 1..20: mol_type = other RNA
aagaggattatcttggaagt

SEQ ID NO: 14086 - RNA, 20 nt, synthetic construct
  source 1..20: mol_type = other RNA
aagataatcctcttctcctc

SEQ ID NO: 14087 - RNA, 20 nt, synthetic construct
  source 1..20: mol_type = other RNA
aagccagagaggagaagagg

SEQ ID NO: 14088 - RNA, 20 nt, synthetic construct
  source 1..20: mol_type = other RNA
aagctttctgaatctgttgg

SEQ ID NO: 14089 - RNA, 20 nt, synthetic construct
  source 1..20: mol_type = other RNA
aagctttgaatgaactgagg

SEQ ID NO: 14090 - RNA, 20 nt, synthetic construct
  source 1..20: mol_type = other RNA
aaggaaaccaaatagaggaa

SEQ ID NO: 14091 - RNA, 20 nt, synthetic construct
  source 1..20: mol_type = other RNA
aaggagatagatatgcaatt

SEQ ID NO: 14092 - RNA, 20 nt, synthetic construct
  source 1..20: mol_type = other RNA
aaggttatactctataaaat

SEQ ID NO: 14093 - RNA, 20 nt, synthetic construct
  source 1..20: mol_type = other RNA
aagtctcaaaatggaaggtt

SEQ ID NO: 14094 - RNA, 20 nt, synthetic construct
  source 1..20: mol_type = other RNA
aatataacaaaccaagagca

SEQ ID NO: 14095 - RNA, 20 nt, synthetic construct
  source 1..20: mol_type = other RNA
aatcaaccaaaatgttgatc

SEQ ID NO: 14096 - RNA, 20 nt, synthetic construct
  source 1..20: mol_type = other RNA
aatcctcttctcctctctgg

SEQ ID NO: 14097 - RNA, 20 nt, synthetic construct
  source 1..20: mol_type = other RNA
aatctaagccagagaggaga

SEQ ID NO: 14098 - RNA, 20 nt, synthetic construct
  source 1..20: mol_type = other RNA
aatctgttggatggatcaac

SEQ ID NO: 14099 - RNA, 20 nt, synthetic construct
  source 1..20: mol_type = other RNA
aatgaactgaggcaaattta

SEQ ID NO: 14100 - RNA, 20 nt, synthetic construct
  source 1..20: mol_type = other RNA
aatggaaggttatactctat

SEQ ID NO: 14101 - RNA, 20 nt, synthetic construct
  source 1..20: mol_type = other RNA
aatggtaaatataacaaacc

SEQ ID NO: 14102 - RNA, 20 nt, synthetic construct
  source 1..20: mol_type = other RNA
aatgttgatccatccaacag

SEQ ID NO: 14103 - RNA, 20 nt, synthetic construct
  source 1..20: mol_type = other RNA
aattgcatatctatctcctt

SEQ ID NO: 14104 - RNA, 20 nt, synthetic construct
  source 1..20: mol_type = other RNA
aatttgcctcagttcattca

SEQ ID NO: 14105 - RNA, 20 nt, synthetic construct
  source 1..20: mol_type = other RNA
acaaaccaagagcaaaatct

SEQ ID NO: 14106 - RNA, 20 nt, synthetic construct
  source 1..20: mol_type = other RNA
acaacctaaatggtaaatat

SEQ ID NO: 14107 - RNA, 20 nt, synthetic construct
  source 1..20: mol_type = other RNA
acactcatcatgccaccacc

SEQ ID NO: 14108 - RNA, 20 nt, synthetic construct
  source 1..20: mol_type = other RNA
acagattcagaaagctttga

SEQ ID NO: 14109 - RNA, 20 nt, synthetic construct
  source 1..20: mol_type = other RNA
acattttggttgattttata

SEQ ID NO: 14110 - RNA, 20 nt, synthetic construct
  source 1..20: mol_type = other RNA
accaaaatgttgatccatcc

SEQ ID NO: 14111 - RNA, 20 nt, synthetic construct
  source 1..20: mol_type = other RNA
accaagagcaaaatctaagc

SEQ ID NO: 14112 - RNA, 20 nt, synthetic construct
  source 1..20: mol_type = other RNA
accaccagcctcctaaagga

SEQ ID NO: 14113 - RNA, 20 nt, synthetic construct
  source 1..20: mol_type = other RNA
accagcctcctaaaggagat

SEQ ID NO: 14114 - RNA, 20 nt, synthetic construct
  source 1..20: mol_type = other RNA
accatttaggttgttttctc

SEQ ID NO: 14115 - RNA, 20 nt, synthetic construct
  source 1..20: mol_type = other RNA
acccattaaattgcatatct

SEQ ID NO: 14116 - RNA, 20 nt, synthetic construct
  source 1..20: mol_type = other RNA
acctaaatggtaaatataac

SEQ ID NO: 14117 - RNA, 20 nt, synthetic construct
  source 1..20: mol_type = other RNA
accttccattttgagacttc

SEQ ID NO: 14118 - RNA, 20 nt, synthetic construct
  source 1..20: mol_type = other RNA
actcatcatgccaccaccag

SEQ ID NO: 14119 - RNA, 20 nt, synthetic construct
  source 1..20: mol_type = other RNA
actctataaaatcaaccaaa

SEQ ID NO: 14120 - RNA, 20 nt, synthetic construct
  source 1..20: mol_type = other RNA
acttccaagataatcctctt

SEQ ID NO: 14121 - RNA, 20 nt, synthetic construct
  source 1..20: mol_type = other RNA
agaaaacaacctaaatggta

SEQ ID NO: 14122 - RNA, 20 nt, synthetic construct
  source 1..20: mol_type = other RNA
agaaagctttgaatgaactg

SEQ ID NO: 14123 - RNA, 20 nt, synthetic construct
  source 1..20: mol_type = other RNA
agaagaggattatcttggaa

SEQ ID NO: 14124 - RNA, 20 nt, synthetic construct
  source 1..20: mol_type = other RNA
agacttccaagataatcctc

SEQ ID NO: 14125 - RNA, 20 nt, synthetic construct
  source 1..20: mol_type = other RNA
agagaggagaagaggattat

SEQ ID NO: 14126 - RNA, 20 nt, synthetic construct
  source 1..20: mol_type = other RNA
agagcaaaatctaagccaga

SEQ ID NO: 14127 - RNA, 20 nt, synthetic construct
  source 1..20: mol_type = other RNA
agaggagaagaggattatct

SEQ ID NO: 14128 - RNA, 20 nt, synthetic construct
  source 1..20: mol_type = other RNA
agaggattatcttggaagtc

SEQ ID NO: 14129 - RNA, 20 nt, synthetic construct
  source 1..20: mol_type = other RNA
agagtataaccttccatttt

SEQ ID NO: 14130 - RNA, 20 nt, synthetic construct
  source 1..20: mol_type = other RNA
agataatcctcttctcctct

SEQ ID NO: 14131 - RNA, 20 nt, synthetic construct
  source 1..20: mol_type = other RNA
agattcagaaagctttgaat

SEQ ID NO: 14132 - RNA, 20 nt, synthetic construct
  source 1..20: mol_type = other RNA
agattttgctcttggtttgt

SEQ ID NO: 14133 - RNA, 20 nt, synthetic construct
  source 1..20: mol_type = other RNA
agcaaaatctaagccagaga

SEQ ID NO: 14134 - RNA, 20 nt, synthetic construct
  source 1..20: mol_type = other RNA
agccagagaggagaagagga

SEQ ID NO: 14135 - RNA, 20 nt, synthetic construct
  source 1..20: mol_type = other RNA
agcctcctaaaggagataga

SEQ ID NO: 14136 - RNA, 20 nt, synthetic construct
  source 1..20: mol_type = other RNA
agctttctgaatctgttgga

SEQ ID NO: 14137 - RNA, 20 nt, synthetic construct
  source 1..20: mol_type = other RNA
agctttgaatgaactgaggc

SEQ ID NO: 14138 - RNA, 20 nt, synthetic construct
  source 1..20: mol_type = other RNA
aggaaaccaaatagaggaag

SEQ ID NO: 14139 - RNA, 20 nt, synthetic construct
  source 1..20: mol_type = other RNA
aggagaagaggattatcttg

SEQ ID NO: 14140 - RNA, 20 nt, synthetic construct
  source 1..20: mol_type = other RNA
aggaggctggtggtggcatg

SEQ ID NO: 14141 - RNA, 20 nt, synthetic construct
  source 1..20: mol_type = other RNA
aggattatcttggaagtctc

SEQ ID NO: 14142 - RNA, 20 nt, synthetic construct
  source 1..20: mol_type = other RNA
aggctggtggtggcatgatg

SEQ ID NO: 14143 - RNA, 20 nt, synthetic construct
  source 1..20: mol_type = other RNA
aggttatactctataaaatc

SEQ ID NO: 14144 - RNA, 20 nt, synthetic construct
  source 1..20: mol_type = other RNA
aggttgttttctccacactc

SEQ ID NO: 14145 - RNA, 20 nt, synthetic construct
  source 1..20: mol_type = other RNA
agtataaccttccattttga

SEQ ID NO: 14146 - RNA, 20 nt, synthetic construct
  source 1..20: mol_type = other RNA
agtctcaaaatggaaggtta

SEQ ID NO: 14147 - RNA, 20 nt, synthetic construct
  source 1..20: mol_type = other RNA
agtgtggagaaaacaaccta

SEQ ID NO: 14148 - RNA, 20 nt, synthetic construct
  source 1..20: mol_type = other RNA
agttcattcaaagctttctg

SEQ ID NO: 14149 - RNA, 20 nt, synthetic construct
  source 1..20: mol_type = other RNA
agttgcttcctctatttggt

SEQ ID NO: 14150 - RNA, 20 nt, synthetic construct
  source 1..20: mol_type = other RNA
ataaaatcaaccaaaatgtt

SEQ ID NO: 14151 - RNA, 20 nt, synthetic construct
  source 1..20: mol_type = other RNA
ataacaaaccaagagcaaaa

SEQ ID NO: 14152 - RNA, 20 nt, synthetic construct
  source 1..20: mol_type = other RNA
ataaccttccattttgagac

SEQ ID NO: 14153 - RNA, 20 nt, synthetic construct
  source 1..20: mol_type = other RNA
ataatcctcttctcctctct

SEQ ID NO: 14154 - RNA, 20 nt, synthetic construct
  source 1..20: mol_type = other RNA
atactctataaaatcaacca

SEQ ID NO: 14155 - RNA, 20 nt, synthetic construct
  source 1..20: mol_type = other RNA
atagagtataaccttccatt

SEQ ID NO: 14156 - RNA, 20 nt, synthetic construct
  source 1..20: mol_type = other RNA
atataacaaaccaagagcaa

SEQ ID NO: 14157 - RNA, 20 nt, synthetic construct
  source 1..20: mol_type = other RNA
atatctatctcctttaggag

SEQ ID NO: 14158 - RNA, 20 nt, synthetic construct
  source 1..20: mol_type = other RNA
atatttaccatttaggttgt

SEQ ID NO: 14159 - RNA, 20 nt, synthetic construct
  source 1..20: mol_type = other RNA
atcaacattttggttgattt

SEQ ID NO: 14160 - RNA, 20 nt, synthetic construct
  source 1..20: mol_type = other RNA
atcaaccaaaatgttgatcc

SEQ ID NO: 14161 - RNA, 20 nt, synthetic construct
  source 1..20: mol_type = other RNA
atcatgccaccaccagcctc

SEQ ID NO: 14162 - RNA, 20 nt, synthetic construct
  source 1..20: mol_type = other RNA
atccaacagattcagaaagc

SEQ ID NO: 14163 - RNA, 20 nt, synthetic construct
  source 1..20: mol_type = other RNA
atccatccaacagattcaga

SEQ ID NO: 14164 - RNA, 20 nt, synthetic construct
  source 1..20: mol_type = other RNA
atcctcttctcctctctggc

SEQ ID NO: 14165 - RNA, 20 nt, synthetic construct
  source 1..20: mol_type = other RNA
atctaagccagagaggagaa

SEQ ID NO: 14166 - RNA, 20 nt, synthetic construct
  source 1..20: mol_type = other RNA
atctatctcctttaggaggc

SEQ ID NO: 14167 - RNA, 20 nt, synthetic construct
  source 1..20: mol_type = other RNA
atctcctttaggaggctggt

SEQ ID NO: 14168 - RNA, 20 nt, synthetic construct
  source 1..20: mol_type = other RNA
atctgttggatggatcaaca

SEQ ID NO: 14169 - RNA, 20 nt, synthetic construct
  source 1..20: mol_type = other RNA
atcttggaagtctcaaaatg

SEQ ID NO: 14170 - RNA, 20 nt, synthetic construct
  source 1..20: mol_type = other RNA
atgaactgaggcaaatttaa

SEQ ID NO: 14171 - RNA, 20 nt, synthetic construct
  source 1..20: mol_type = other RNA
atgagtgtggagaaaacaac

SEQ ID NO: 14172 - RNA, 20 nt, synthetic construct
  source 1..20: mol_type = other RNA
atgagttgcttcctctattt

SEQ ID NO: 14173 - RNA, 20 nt, synthetic construct
  source 1..20: mol_type = other RNA
atgatgagtgtggagaaaac

SEQ ID NO: 14174 - RNA, 20 nt, synthetic construct
  source 1..20: mol_type = other RNA
atgccaccaccagcctccta

SEQ ID NO: 14175 - RNA, 20 nt, synthetic construct
  source 1..20: mol_type = other RNA
atggaaggttatactctata

SEQ ID NO: 14176 - RNA, 20 nt, synthetic construct
  source 1..20: mol_type = other RNA
atggatcaacattttggttg

SEQ ID NO: 14177 - RNA, 20 nt, synthetic construct
  source 1..20: mol_type = other RNA
atggtaaatataacaaacca

SEQ ID NO: 14178 - RNA, 20 nt, synthetic construct
  source 1..20: mol_type = other RNA
atgtcctatgagagtttttt

SEQ ID NO: 14179 - RNA, 20 nt, synthetic construct
  source 1..20: mol_type = other RNA
atgttgatccatccaacaga

SEQ ID NO: 14180 - RNA, 20 nt, synthetic construct
  source 1..20: mol_type = other RNA
attaaattgcatatctatct

SEQ ID NO: 14181 - RNA, 20 nt, synthetic construct
  source 1..20: mol_type = other RNA
attatcttggaagtctcaaa

SEQ ID NO: 14182 - RNA, 20 nt, synthetic construct
  source 1..20: mol_type = other RNA
attcaaagctttctgaatct

SEQ ID NO: 14183 - RNA, 20 nt, synthetic construct
  source 1..20: mol_type = other RNA
attcagaaagctttgaatga

SEQ ID NO: 14184 - RNA, 20 nt, synthetic construct
  source 1..20: mol_type = other RNA
attgcatatctatctccttt

SEQ ID NO: 14185 - RNA, 20 nt, synthetic construct
  source 1..20: mol_type = other RNA
attgccttttaaatttgcct

SEQ ID NO: 14186 - RNA, 20 nt, synthetic construct
  source 1..20: mol_type = other RNA
atttaccatttaggttgttt

SEQ ID NO: 14187 - RNA, 20 nt, synthetic construct
  source 1..20: mol_type = other RNA
atttaggttgttttctccac

SEQ ID NO: 14188 - RNA, 20 nt, synthetic construct
  source 1..20: mol_type = other RNA
atttgcctcagttcattcaa

SEQ ID NO: 14189 - RNA, 20 nt, synthetic construct
  source 1..20: mol_type = other RNA
attttatagagtataacctt

SEQ ID NO: 14190 - RNA, 20 nt, synthetic construct
  source 1..20: mol_type = other RNA
attttgagacttccaagata

SEQ ID NO: 14191 - RNA, 20 nt, synthetic construct
  source 1..20: mol_type = other RNA
attttgctcttggtttgtta

SEQ ID NO: 14192 - RNA, 20 nt, synthetic construct
  source 1..20: mol_type = other RNA
attttggttgattttataga

SEQ ID NO: 14193 - RNA, 20 nt, synthetic construct
  source 1..20: mol_type = other RNA
caaaatctaagccagagagg

SEQ ID NO: 14194 - RNA, 20 nt, synthetic construct
  source 1..20: mol_type = other RNA
caaaatggaaggttatactc

SEQ ID NO: 14195 - RNA, 20 nt, synthetic construct
  source 1..20: mol_type = other RNA
caaaatgttgatccatccaa

SEQ ID NO: 14196 - RNA, 20 nt, synthetic construct
  source 1..20: mol_type = other RNA
caaaccaagagcaaaatcta

SEQ ID NO: 14197 - RNA, 20 nt, synthetic construct
  source 1..20: mol_type = other RNA
caaagctttctgaatctgtt

SEQ ID NO: 14198 - RNA, 20 nt, synthetic construct
  source 1..20: mol_type = other RNA
caacagattcagaaagcttt

SEQ ID NO: 14199 - RNA, 20 nt, synthetic construct
  source 1..20: mol_type = other RNA
caacattttggttgatttta

SEQ ID NO: 14200 - RNA, 20 nt, synthetic construct
  source 1..20: mol_type = other RNA
caaccaaaatgttgatccat

SEQ ID NO: 14201 - RNA, 20 nt, synthetic construct
  source 1..20: mol_type = other RNA
caacctaaatggtaaatata

SEQ ID NO: 14202 - RNA, 20 nt, synthetic construct
  source 1..20: mol_type = other RNA
caagagcaaaatctaagcca

SEQ ID NO: 14203 - RNA, 20 nt, synthetic construct
  source 1..20: mol_type = other RNA
caagataatcctcttctcct

SEQ ID NO: 14204 - RNA, 20 nt, synthetic construct
  source 1..20: mol_type = other RNA
cacactcatcatgccaccac

SEQ ID NO: 14205 - RNA, 20 nt, synthetic construct
  source 1..20: mol_type = other RNA
caccaccagcctcctaaagg

SEQ ID NO: 14206 - RNA, 20 nt, synthetic construct
  source 1..20: mol_type = other RNA
caccagcctcctaaaggaga

SEQ ID NO: 14207 - RNA, 20 nt, synthetic construct
  source 1..20: mol_type = other RNA
cactcatcatgccaccacca

SEQ ID NO: 14208 - RNA, 20 nt, synthetic construct
  source 1..20: mol_type = other RNA
cagaaagctttgaatgaact

SEQ ID NO: 14209 - RNA, 20 nt, synthetic construct
  source 1..20: mol_type = other RNA
cagagaggagaagaggatta

SEQ ID NO: 14210 - RNA, 20 nt, synthetic construct
  source 1..20: mol_type = other RNA
cagattcagaaagctttgaa

SEQ ID NO: 14211 - RNA, 20 nt, synthetic construct
  source 1..20: mol_type = other RNA
cagcctcctaaaggagatag

SEQ ID NO: 14212 - RNA, 20 nt, synthetic construct
  source 1..20: mol_type = other RNA
cagttcattcaaagctttct

SEQ ID NO: 14213 - RNA, 20 nt, synthetic construct
  source 1..20: mol_type = other RNA
catatctatctcctttagga

SEQ ID NO: 14214 - RNA, 20 nt, synthetic construct
  source 1..20: mol_type = other RNA
catcatgccaccaccagcct

SEQ ID NO: 14215 - RNA, 20 nt, synthetic construct
  source 1..20: mol_type = other RNA
catccaacagattcagaaag

SEQ ID NO: 14216 - RNA, 20 nt, synthetic construct
  source 1..20: mol_type = other RNA
catgatgagtgtggagaaaa

SEQ ID NO: 14217 - RNA, 20 nt, synthetic construct
  source 1..20: mol_type = other RNA
catgccaccaccagcctcct

SEQ ID NO: 14218 - RNA, 20 nt, synthetic construct
  source 1..20: mol_type = other RNA
cattaaattgcatatctatc

SEQ ID NO: 14219 - RNA, 20 nt, synthetic construct
  source 1..20: mol_type = other RNA
cattcaaagctttctgaatc

SEQ ID NO: 14220 - RNA, 20 nt, synthetic construct
  source 1..20: mol_type = other RNA
catttaggttgttttctcca

SEQ ID NO: 14221 - RNA, 20 nt, synthetic construct
  source 1..20: mol_type = other RNA
cattttgagacttccaagat

SEQ ID NO: 14222 - RNA, 20 nt, synthetic construct
  source 1..20: mol_type = other RNA
cattttggttgattttatag

SEQ ID NO: 14223 - RNA, 20 nt, synthetic construct
  source 1..20: mol_type = other RNA
ccaaaatgttgatccatcca

SEQ ID NO: 14224 - RNA, 20 nt, synthetic construct
  source 1..20: mol_type = other RNA
ccaacagattcagaaagctt

SEQ ID NO: 14225 - RNA, 20 nt, synthetic construct
  source 1..20: mol_type = other RNA
ccaagagcaaaatctaagcc

SEQ ID NO: 14226 - RNA, 20 nt, synthetic construct
  source 1..20: mol_type = other RNA
ccaagataatcctcttctcc

SEQ ID NO: 14227 - RNA, 20 nt, synthetic construct
  source 1..20: mol_type = other RNA
ccacactcatcatgccacca

SEQ ID NO: 14228 - RNA, 20 nt, synthetic construct
  source 1..20: mol_type = other RNA
ccaccaccagcctcctaaag

SEQ ID NO: 14229 - RNA, 20 nt, synthetic construct
  source 1..20: mol_type = other RNA
ccaccagcctcctaaaggag

SEQ ID NO: 14230 - RNA, 20 nt, synthetic construct
  source 1..20: mol_type = other RNA
ccagagaggagaagaggatt

SEQ ID NO: 14231 - RNA, 20 nt, synthetic construct
  source 1..20: mol_type = other RNA
ccagcctcctaaaggagata

SEQ ID NO: 14232 - RNA, 20 nt, synthetic construct
  source 1..20: mol_type = other RNA
ccatccaacagattcagaaa

SEQ ID NO: 14233 - RNA, 20 nt, synthetic construct
  source 1..20: mol_type = other RNA
ccattaaattgcatatctat

SEQ ID NO: 14234 - RNA, 20 nt, synthetic construct
  source 1..20: mol_type = other RNA
ccatttaggttgttttctcc

SEQ ID NO: 14235 - RNA, 20 nt, synthetic construct
  source 1..20: mol_type = other RNA
ccattttgagacttccaaga

SEQ ID NO: 14236 - RNA, 20 nt, synthetic construct
  source 1..20: mol_type = other RNA
cccattaaattgcatatcta

SEQ ID NO: 14237 - RNA, 20 nt, synthetic construct
  source 1..20: mol_type = other RNA
cctaaaggagatagatatgc

SEQ ID NO: 14238 - RNA, 20 nt, synthetic construct
  source 1..20: mol_type = other RNA
cctaaatggtaaatataaca

SEQ ID NO: 14239 - RNA, 20 nt, synthetic construct
  source 1..20: mol_type = other RNA
cctcagttcattcaaagctt

SEQ ID NO: 14240 - RNA, 20 nt, synthetic construct
  source 1..20: mol_type = other RNA
cctcctaaaggagatagata

SEQ ID NO: 14241 - RNA, 20 nt, synthetic construct
  source 1..20: mol_type = other RNA
cctctatttggtttccttaa

SEQ ID NO: 14242 - RNA, 20 nt, synthetic construct
  source 1..20: mol_type = other RNA
cctctctggcttagattttg

SEQ ID NO: 14243 - RNA, 20 nt, synthetic construct
  source 1..20: mol_type = other RNA
cctcttctcctctctggctt

SEQ ID NO: 14244 - RNA, 20 nt, synthetic construct
  source 1..20: mol_type = other RNA
ccttccattttgagacttcc

SEQ ID NO: 14245 - RNA, 20 nt, synthetic construct
  source 1..20: mol_type = other RNA
cctttaggaggctggtggtg

SEQ ID NO: 14246 - RNA, 20 nt, synthetic construct
  source 1..20: mol_type = other RNA
ccttttaaatttgcctcagt

SEQ ID NO: 14247 - RNA, 20 nt, synthetic construct
  source 1..20: mol_type = other RNA
ctaaaggagatagatatgca

SEQ ID NO: 14248 - RNA, 20 nt, synthetic construct
  source 1..20: mol_type = other RNA
ctaaatggtaaatataacaa

SEQ ID NO: 14249 - RNA, 20 nt, synthetic construct
  source 1..20: mol_type = other RNA
ctaagccagagaggagaaga

SEQ ID NO: 14250 - RNA, 20 nt, synthetic construct
  source 1..20: mol_type = other RNA
ctataaaatcaaccaaaatg

SEQ ID NO: 14251 - RNA, 20 nt, synthetic construct
  source 1..20: mol_type = other RNA
ctatctcctttaggaggctg

SEQ ID NO: 14252 - RNA, 20 nt, synthetic construct
  source 1..20: mol_type = other RNA
ctatttggtttccttaaaaa

SEQ ID NO: 14253 - RNA, 20 nt, synthetic construct
  source 1..20: mol_type = other RNA
ctcaaaatggaaggttatac

SEQ ID NO: 14254 - RNA, 20 nt, synthetic construct
  source 1..20: mol_type = other RNA
ctcagttcattcaaagcttt

SEQ ID NO: 14255 - RNA, 20 nt, synthetic construct
  source 1..20: mol_type = other RNA
ctcatcatgccaccaccagc

SEQ ID NO: 14256 - RNA, 20 nt, synthetic construct
  source 1..20: mol_type = other RNA
ctccacactcatcatgccac

SEQ ID NO: 14257 - RNA, 20 nt, synthetic construct
  source 1..20: mol_type = other RNA
ctcctaaaggagatagatat

SEQ ID NO: 14258 - RNA, 20 nt, synthetic construct
  source 1..20: mol_type = other RNA
ctcctctctggcttagattt

SEQ ID NO: 14259 - RNA, 20 nt, synthetic construct
  source 1..20: mol_type = other RNA
ctcctttaggaggctggtgg

SEQ ID NO: 14260 - RNA, 20 nt, synthetic construct
  source 1..20: mol_type = other RNA
ctctataaaatcaaccaaaa

SEQ ID NO: 14261 - RNA, 20 nt, synthetic construct
  source 1..20: mol_type = other RNA
ctctatttggtttccttaaa

SEQ ID NO: 14262 - RNA, 20 nt, synthetic construct
  source 1..20: mol_type = other RNA
ctctctggcttagattttgc

SEQ ID NO: 14263 - RNA, 20 nt, synthetic construct
  source 1..20: mol_type = other RNA
ctctggcttagattttgctc

SEQ ID NO: 14264 - RNA, 20 nt, synthetic construct
  source 1..20: mol_type = other RNA
ctcttctcctctctggctta

SEQ ID NO: 14265 - RNA, 20 nt, synthetic construct
  source 1..20: mol_type = other RNA
ctcttggtttgttatattta

SEQ ID NO: 14266 - RNA, 20 nt, synthetic construct
  source 1..20: mol_type = other RNA
ctgaatctgttggatggatc

SEQ ID NO: 14267 - RNA, 20 nt, synthetic construct
  source 1..20: mol_type = other RNA
ctggcttagattttgctctt

SEQ ID NO: 14268 - RNA, 20 nt, synthetic construct
  source 1..20: mol_type = other RNA
ctggtggtggcatgatgagt

SEQ ID NO: 14269 - RNA, 20 nt, synthetic construct
  source 1..20: mol_type = other RNA
ctgttggatggatcaacatt

SEQ ID NO: 14270 - RNA, 20 nt, synthetic construct
  source 1..20: mol_type = other RNA
cttagattttgctcttggtt

SEQ ID NO: 14271 - RNA, 20 nt, synthetic construct
  source 1..20: mol_type = other RNA
cttccaagataatcctcttc

SEQ ID NO: 14272 - RNA, 20 nt, synthetic construct
  source 1..20: mol_type = other RNA
cttccattttgagacttcca

SEQ ID NO: 14273 - RNA, 20 nt, synthetic construct
  source 1..20: mol_type = other RNA
cttcctctatttggtttcct

SEQ ID NO: 14274 - RNA, 20 nt, synthetic construct
  source 1..20: mol_type = other RNA
cttctcctctctggcttaga

SEQ ID NO: 14275 - RNA, 20 nt, synthetic construct
  source 1..20: mol_type = other RNA
cttggaagtctcaaaatgga

SEQ ID NO: 14276 - RNA, 20 nt, synthetic construct
  source 1..20: mol_type = other RNA
cttggtttgttatatttacc

SEQ ID NO: 14277 - RNA, 20 nt, synthetic construct
  source 1..20: mol_type = other RNA
ctttaggaggctggtggtgg

SEQ ID NO: 14278 - RNA, 20 nt, synthetic construct
  source 1..20: mol_type = other RNA
ctttctgaatctgttggatg

SEQ ID NO: 14279 - RNA, 20 nt, synthetic construct
  source 1..20: mol_type = other RNA
ctttgaatgaactgaggcaa

SEQ ID NO: 14280 - RNA, 20 nt, synthetic construct
  source 1..20: mol_type = other RNA
cttttaaatttgcctcagtt

SEQ ID NO: 14281 - RNA, 20 nt, synthetic construct
  source 1..20: mol_type = other RNA
gaaaacaacctaaatggtaa

SEQ ID NO: 14282 - RNA, 20 nt, synthetic construct
  source 1..20: mol_type = other RNA
gaaagctttgaatgaactga

SEQ ID NO: 14283 - RNA, 20 nt, synthetic construct
  source 1..20: mol_type = other RNA
gaactgaggcaaatttaaaa

SEQ ID NO: 14284 - RNA, 20 nt, synthetic construct
  source 1..20: mol_type = other RNA
gaagaggattatcttggaag

SEQ ID NO: 14285 - RNA, 20 nt, synthetic construct
  source 1..20: mol_type = other RNA
gaaggttatactctataaaa

SEQ ID NO: 14286 - RNA, 20 nt, synthetic construct
  source 1..20: mol_type = other RNA
gaagtctcaaaatggaaggt

SEQ ID NO: 14287 - RNA, 20 nt, synthetic construct
  source 1..20: mol_type = other RNA
gaatctgttggatggatcaa

SEQ ID NO: 14288 - RNA, 20 nt, synthetic construct
  source 1..20: mol_type = other RNA
gaatgaactgaggcaaattt

SEQ ID NO: 14289 - RNA, 20 nt, synthetic construct
  source 1..20: mol_type = other RNA
gacttccaagataatcctct

SEQ ID NO: 14290 - RNA, 20 nt, synthetic construct
  source 1..20: mol_type = other RNA
gagaaaacaacctaaatggt

SEQ ID NO: 14291 - RNA, 20 nt, synthetic construct
  source 1..20: mol_type = other RNA
gagaagaggattatcttgga

SEQ ID NO: 14292 - RNA, 20 nt, synthetic construct
  source 1..20: mol_type = other RNA
gagacttccaagataatcct

SEQ ID NO: 14293 - RNA, 20 nt, synthetic construct
  source 1..20: mol_type = other RNA
gagaggagaagaggattatc

SEQ ID NO: 14294 - RNA, 20 nt, synthetic construct
  source 1..20: mol_type = other RNA
gagcaaaatctaagccagag

SEQ ID NO: 14295 - RNA, 20 nt, synthetic construct
  source 1..20: mol_type = other RNA
gaggagaagaggattatctt

SEQ ID NO: 14296 - RNA, 20 nt, synthetic construct
  source 1..20: mol_type = other RNA
gaggattatcttggaagtct

SEQ ID NO: 14297 - RNA, 20 nt, synthetic construct
  source 1..20: mol_type = other RNA
gaggctggtggtggcatgat

SEQ ID NO: 14298 - RNA, 20 nt, synthetic construct
  source 1..20: mol_type = other RNA
gagtataaccttccattttg

SEQ ID NO: 14299 - RNA, 20 nt, synthetic construct
  source 1..20: mol_type = other RNA
gagtgtggagaaaacaacct

SEQ ID NO: 14300 - RNA, 20 nt, synthetic construct
  source 1..20: mol_type = other RNA
gagttgcttcctctatttgg

SEQ ID NO: 14301 - RNA, 20 nt, synthetic construct
  source 1..20: mol_type = other RNA
gataatcctcttctcctctc

SEQ ID NO: 14302 - RNA, 20 nt, synthetic construct
  source 1..20: mol_type = other RNA
gatcaacattttggttgatt

SEQ ID NO: 14303 - RNA, 20 nt, synthetic construct
  source 1..20: mol_type = other RNA
gatccatccaacagattcag

SEQ ID NO: 14304 - RNA, 20 nt, synthetic construct
  source 1..20: mol_type = other RNA
gatgagtgtggagaaaacaa

SEQ ID NO: 14305 - RNA, 20 nt, synthetic construct
  source 1..20: mol_type = other RNA
gatggatcaacattttggtt

SEQ ID NO: 14306 - RNA, 20 nt, synthetic construct
  source 1..20: mol_type = other RNA
gattatcttggaagtctcaa

SEQ ID NO: 14307 - RNA, 20 nt, synthetic construct
  source 1..20: mol_type = other RNA
gattcagaaagctttgaatg

SEQ ID NO: 14308 - RNA, 20 nt, synthetic construct
  source 1..20: mol_type = other RNA
gattttatagagtataacct

SEQ ID NO: 14309 - RNA, 20 nt, synthetic construct
  source 1..20: mol_type = other RNA
gattttgctcttggtttgtt

SEQ ID NO: 14310 - RNA, 20 nt, synthetic construct
  source 1..20: mol_type = other RNA
gcaaaatctaagccagagag

SEQ ID NO: 14311 - RNA, 20 nt, synthetic construct
  source 1..20: mol_type = other RNA
gcatatctatctcctttagg

SEQ ID NO: 14312 - RNA, 20 nt, synthetic construct
  source 1..20: mol_type = other RNA
gcatgatgagtgtggagaaa

SEQ ID NO: 14313 - RNA, 20 nt, synthetic construct
  source 1..20: mol_type = other RNA
gccaccaccagcctcctaaa

SEQ ID NO: 14314 - RNA, 20 nt, synthetic construct
  source 1..20: mol_type = other RNA
gccagagaggagaagaggat

SEQ ID NO: 14315 - RNA, 20 nt, synthetic construct
  source 1..20: mol_type = other RNA
gcctcagttcattcaaagct

SEQ ID NO: 14316 - RNA, 20 nt, synthetic construct
  source 1..20: mol_type = other RNA
gcctcctaaaggagatagat

SEQ ID NO: 14317 - RNA, 20 nt, synthetic construct
  source 1..20: mol_type = other RNA
gccttttaaatttgcctcag

SEQ ID NO: 14318 - RNA, 20 nt, synthetic construct
  source 1..20: mol_type = other RNA
gctcttggtttgttatattt

SEQ ID NO: 14319 - RNA, 20 nt, synthetic construct
  source 1..20: mol_type = other RNA
gctggtggtggcatgatgag

SEQ ID NO: 14320 - RNA, 20 nt, synthetic construct
  source 1..20: mol_type = other RNA
gcttagattttgctcttggt

SEQ ID NO: 14321 - RNA, 20 nt, synthetic construct
  source 1..20: mol_type = other RNA
gcttcctctatttggtttcc

SEQ ID NO: 14322 - RNA, 20 nt, synthetic construct
  source 1..20: mol_type = other RNA
gctttctgaatctgttggat

SEQ ID NO: 14323 - RNA, 20 nt, synthetic construct
  source 1..20: mol_type = other RNA
gctttgaatgaactgaggca

SEQ ID NO: 14324 - RNA, 20 nt, synthetic construct
  source 1..20: mol_type = other RNA
ggaaggttatactctataaa

SEQ ID NO: 14325 - RNA, 20 nt, synthetic construct
  source 1..20: mol_type = other RNA
ggaagtctcaaaatggaagg

SEQ ID NO: 14326 - RNA, 20 nt, synthetic construct
  source 1..20: mol_type = other RNA
ggagaaaacaacctaaatgg

SEQ ID NO: 14327 - RNA, 20 nt, synthetic construct
  source 1..20: mol_type = other RNA
ggagaagaggattatcttgg

SEQ ID NO: 14328 - RNA, 20 nt, synthetic construct
  source 1..20: mol_type = other RNA
ggaggctggtggtggcatga

SEQ ID NO: 14329 - RNA, 20 nt, synthetic construct
  source 1..20: mol_type = other RNA
ggatcaacattttggttgat

SEQ ID NO: 14330 - RNA, 20 nt, synthetic construct
  source 1..20: mol_type = other RNA
ggatggatcaacattttggt

SEQ ID NO: 14331 - RNA, 20 nt, synthetic construct
  source 1..20: mol_type = other RNA
ggattatcttggaagtctca

SEQ ID NO: 14332 - RNA, 20 nt, synthetic construct
  source 1..20: mol_type = other RNA
ggcatgatgagtgtggagaa

SEQ ID NO: 14333 - RNA, 20 nt, synthetic construct
  source 1..20: mol_type = other RNA
ggctggtggtggcatgatga

SEQ ID NO: 14334 - RNA, 20 nt, synthetic construct
  source 1..20: mol_type = other RNA
ggcttagattttgctcttgg

SEQ ID NO: 14335 - RNA, 20 nt, synthetic construct
  source 1..20: mol_type = other RNA
ggtaaatataacaaaccaag

SEQ ID NO: 14336 - RNA, 20 nt, synthetic construct
  source 1..20: mol_type = other RNA
ggtggcatgatgagtgtgga

SEQ ID NO: 14337 - RNA, 20 nt, synthetic construct
  source 1..20: mol_type = other RNA
ggtggtggcatgatgagtgt

SEQ ID NO: 14338 - RNA, 20 nt, synthetic construct
  source 1..20: mol_type = other RNA
ggttatactctataaaatca

SEQ ID NO: 14339 - RNA, 20 nt, synthetic construct
  source 1..20: mol_type = other RNA
ggttgattttatagagtata

SEQ ID NO: 14340 - RNA, 20 nt, synthetic construct
  source 1..20: mol_type = other RNA
ggttgttttctccacactca

SEQ ID NO: 14341 - RNA, 20 nt, synthetic construct
  source 1..20: mol_type = other RNA
ggtttgttatatttaccatt

SEQ ID NO: 14342 - RNA, 20 nt, synthetic construct
  source 1..20: mol_type = other RNA
gtaaatataacaaaccaaga

SEQ ID NO: 14343 - RNA, 20 nt, synthetic construct
  source 1..20: mol_type = other RNA
gtataaccttccattttgag

SEQ ID NO: 14344 - RNA, 20 nt, synthetic construct
  source 1..20: mol_type = other RNA
gtctcaaaatggaaggttat

SEQ ID NO: 14345 - RNA, 20 nt, synthetic construct
  source 1..20: mol_type = other RNA
gtggagaaaacaacctaaat

SEQ ID NO: 14346 - RNA, 20 nt, synthetic construct
  source 1..20: mol_type = other RNA
gtggcatgatgagtgtggag

SEQ ID NO: 14347 - RNA, 20 nt, synthetic construct
  source 1..20: mol_type = other RNA
gtggtggcatgatgagtgtg

SEQ ID NO: 14348 - RNA, 20 nt, synthetic construct
  source 1..20: mol_type = other RNA
gtgtggagaaaacaacctaa

SEQ ID NO: 14349 - RNA, 20 nt, synthetic construct
  source 1..20: mol_type = other RNA
gttatactctataaaatcaa

SEQ ID NO: 14350 - RNA, 20 nt, synthetic construct
  source 1..20: mol_type = other RNA
gttatatttaccatttaggt

SEQ ID NO: 14351 - RNA, 20 nt, synthetic construct
  source 1..20: mol_type = other RNA
gttcattcaaagctttctga

SEQ ID NO: 14352 - RNA, 20 nt, synthetic construct
  source 1..20: mol_type = other RNA
gttgatccatccaacagatt

SEQ ID NO: 14353 - RNA, 20 nt, synthetic construct
  source 1..20: mol_type = other RNA
gttgattttatagagtataa

SEQ ID NO: 14354 - RNA, 20 nt, synthetic construct
  source 1..20: mol_type = other RNA
gttgcttcctctatttggtt

SEQ ID NO: 14355 - RNA, 20 nt, synthetic construct
  source 1..20: mol_type = other RNA
gttggatggatcaacatttt

SEQ ID NO: 14356 - RNA, 20 nt, synthetic construct
  source 1..20: mol_type = other RNA
gttgttttctccacactcat

SEQ ID NO: 14357 - RNA, 20 nt, synthetic construct
  source 1..20: mol_type = other RNA
gtttgttatatttaccattt

SEQ ID NO: 14358 - RNA, 20 nt, synthetic construct
  source 1..20: mol_type = other RNA
gttttctccacactcatcat

SEQ ID NO: 14359 - RNA, 20 nt, synthetic construct
  source 1..20: mol_type = other RNA
taaaatcaaccaaaatgttg

SEQ ID NO: 14360 - RNA, 20 nt, synthetic construct
  source 1..20: mol_type = other RNA
taaaggagatagatatgcaa

SEQ ID NO: 14361 - RNA, 20 nt, synthetic construct
  source 1..20: mol_type = other RNA
taaatataacaaaccaagag

SEQ ID NO: 14362 - RNA, 20 nt, synthetic construct
  source 1..20: mol_type = other RNA
taaattgcatatctatctcc

SEQ ID NO: 14363 - RNA, 20 nt, synthetic construct
  source 1..20: mol_type = other RNA
taaatttgcctcagttcatt

SEQ ID NO: 14364 - RNA, 20 nt, synthetic construct
  source 1..20: mol_type = other RNA
taacaaaccaagagcaaaat

SEQ ID NO: 14365 - RNA, 20 nt, synthetic construct
  source 1..20: mol_type = other RNA
taaccttccattttgagact

SEQ ID NO: 14366 - RNA, 20 nt, synthetic construct
  source 1..20: mol_type = other RNA
taagccagagaggagaagag

SEQ ID NO: 14367 - RNA, 20 nt, synthetic construct
  source 1..20: mol_type = other RNA
taaggaaaccaaatagagga

SEQ ID NO: 14368 - RNA, 20 nt, synthetic construct
  source 1..20: mol_type = other RNA
taatcctcttctcctctctg

SEQ ID NO: 14369 - RNA, 20 nt, synthetic construct
  source 1..20: mol_type = other RNA
taccatttaggttgttttct

SEQ ID NO: 14370 - RNA, 20 nt, synthetic construct
  source 1..20: mol_type = other RNA
tactctataaaatcaaccaa

SEQ ID NO: 14371 - RNA, 20 nt, synthetic construct
  source 1..20: mol_type = other RNA
tagagtataaccttccattt

SEQ ID NO: 14372 - RNA, 20 nt, synthetic construct
  source 1..20: mol_type = other RNA
tagattttgctcttggtttg

SEQ ID NO: 14373 - RNA, 20 nt, synthetic construct
  source 1..20: mol_type = other RNA
taggaggctggtggtggcat

SEQ ID NO: 14374 - RNA, 20 nt, synthetic construct
  source 1..20: mol_type = other RNA
taggttgttttctccacact

SEQ ID NO: 14375 - RNA, 20 nt, synthetic construct
  source 1..20: mol_type = other RNA
tataaaatcaaccaaaatgt

SEQ ID NO: 14376 - RNA, 20 nt, synthetic construct
  source 1..20: mol_type = other RNA
tataacaaaccaagagcaaa

SEQ ID NO: 14377 - RNA, 20 nt, synthetic construct
  source 1..20: mol_type = other RNA
tataaccttccattttgaga

SEQ ID NO: 14378 - RNA, 20 nt, synthetic construct
  source 1..20: mol_type = other RNA
tatactctataaaatcaacc

SEQ ID NO: 14379 - RNA, 20 nt, synthetic construct
  source 1..20: mol_type = other RNA
tatagagtataaccttccat

SEQ ID NO: 14380 - RNA, 20 nt, synthetic construct
  source 1..20: mol_type = other RNA
tatatttaccatttaggttg

SEQ ID NO: 14381 - RNA, 20 nt, synthetic construct
  source 1..20: mol_type = other RNA
tatctatctcctttaggagg

SEQ ID NO: 14382 - RNA, 20 nt, synthetic construct
  source 1..20: mol_type = other RNA
tatctcctttaggaggctgg

SEQ ID NO: 14383 - RNA, 20 nt, synthetic construct
  source 1..20: mol_type = other RNA
tatcttggaagtctcaaaat

SEQ ID NO: 14384 - RNA, 20 nt, synthetic construct
  source 1..20: mol_type = other RNA
tattgccttttaaatttgcc

SEQ ID NO: 14385 - RNA, 20 nt, synthetic construct
  source 1..20: mol_type = other RNA
tatttaccatttaggttgtt

SEQ ID NO: 14386 - RNA, 20 nt, synthetic construct
  source 1..20: mol_type = other RNA
tatttggtttccttaaaaaa

SEQ ID NO: 14387 - RNA, 20 nt, synthetic construct
  source 1..20: mol_type = other RNA
tcaaaatggaaggttatact

SEQ ID NO: 14388 - RNA, 20 nt, synthetic construct
  source 1..20: mol_type = other RNA
tcaaagctttctgaatctgt

SEQ ID NO: 14389 - RNA, 20 nt, synthetic construct
  source 1..20: mol_type = other RNA
tcaacattttggttgatttt

SEQ ID NO: 14390 - RNA, 20 nt, synthetic construct
  source 1..20: mol_type = other RNA
tcaaccaaaatgttgatcca

SEQ ID NO: 14391 - RNA, 20 nt, synthetic construct
  source 1..20: mol_type = other RNA
tcagaaagctttgaatgaac

SEQ ID NO: 14392 - RNA, 20 nt, synthetic construct
  source 1..20: mol_type = other RNA
tcagttcattcaaagctttc

SEQ ID NO: 14393 - RNA, 20 nt, synthetic construct
  source 1..20: mol_type = other RNA
tcatcatgccaccaccagcc

SEQ ID NO: 14394 - RNA, 20 nt, synthetic construct
  source 1..20: mol_type = other RNA
tcatgccaccaccagcctcc

SEQ ID NO: 14395 - RNA, 20 nt, synthetic construct
  source 1..20: mol_type = other RNA
tcattcaaagctttctgaat

SEQ ID NO: 14396 - RNA, 20 nt, synthetic construct
  source 1..20: mol_type = other RNA
tccaacagattcagaaagct

SEQ ID NO: 14397 - RNA, 20 nt, synthetic construct
  source 1..20: mol_type = other RNA
tccaagataatcctcttctc

SEQ ID NO: 14398 - RNA, 20 nt, synthetic construct
  source 1..20: mol_type = other RNA
tccacactcatcatgccacc

SEQ ID NO: 14399 - RNA, 20 nt, synthetic construct
  source 1..20: mol_type = other RNA
tccatccaacagattcagaa

SEQ ID NO: 14400 - RNA, 20 nt, synthetic construct
  source 1..20: mol_type = other RNA
tccattttgagacttccaag

SEQ ID NO: 14401 - RNA, 20 nt, synthetic construct
  source 1..20: mol_type = other RNA
tcctaaaggagatagatatg

SEQ ID NO: 14402 - RNA, 20 nt, synthetic construct
  source 1..20: mol_type = other RNA
tcctctatttggtttcctta

SEQ ID NO: 14403 - RNA, 20 nt, synthetic construct
  source 1..20: mol_type = other RNA
tcctctctggcttagatttt

SEQ ID NO: 14404 - RNA, 20 nt, synthetic construct
  source 1..20: mol_type = other RNA
tcctcttctcctctctggct

SEQ ID NO: 14405 - RNA, 20 nt, synthetic construct
  source 1..20: mol_type = other RNA
tcctttaggaggctggtggt

SEQ ID NO: 14406 - RNA, 20 nt, synthetic construct
  source 1..20: mol_type = other RNA
tctaagccagagaggagaag

SEQ ID NO: 14407 - RNA, 20 nt, synthetic construct
  source 1..20: mol_type = other RNA
tctataaaatcaaccaaaat

SEQ ID NO: 14408 - RNA, 20 nt, synthetic construct
  source 1..20: mol_type = other RNA
tctatctcctttaggaggct

SEQ ID NO: 14409 - RNA, 20 nt, synthetic construct
  source 1..20: mol_type = other RNA
tctatttggtttccttaaaa

SEQ ID NO: 14410 - RNA, 20 nt, synthetic construct
  source 1..20: mol_type = other RNA
tctcaaaatggaaggttata

SEQ ID NO: 14411 - RNA, 20 nt, synthetic construct
  source 1..20: mol_type = other RNA
tctccacactcatcatgcca

SEQ ID NO: 14412 - RNA, 20 nt, synthetic construct
  source 1..20: mol_type = other RNA
tctcctctctggcttagatt

SEQ ID NO: 14413 - RNA, 20 nt, synthetic construct
  source 1..20: mol_type = other RNA
tctcctttaggaggctggtg

SEQ ID NO: 14414 - RNA, 20 nt, synthetic construct
  source 1..20: mol_type = other RNA
tctctggcttagattttgct

SEQ ID NO: 14415 - RNA, 20 nt, synthetic construct
  source 1..20: mol_type = other RNA
tctgaatctgttggatggat

SEQ ID NO: 14416 - RNA, 20 nt, synthetic construct
  source 1..20: mol_type = other RNA
tctggcttagattttgctct

SEQ ID NO: 14417 - RNA, 20 nt, synthetic construct
  source 1..20: mol_type = other RNA
tctgttggatggatcaacat

SEQ ID NO: 14418 - RNA, 20 nt, synthetic construct
  source 1..20: mol_type = other RNA
tcttctcctctctggcttag

SEQ ID NO: 14419 - RNA, 20 nt, synthetic construct
  source 1..20: mol_type = other RNA
tcttggaagtctcaaaatgg

SEQ ID NO: 14420 - RNA, 20 nt, synthetic construct
  source 1..20: mol_type = other RNA
tcttggtttgttatatttac

SEQ ID NO: 14421 - RNA, 20 nt, synthetic construct
  source 1..20: mol_type = other RNA
tgaactgaggcaaatttaaa

SEQ ID NO: 14422 - RNA, 20 nt, synthetic construct
  source 1..20: mol_type = other RNA
tgaatctgttggatggatca

SEQ ID NO: 14423 - RNA, 20 nt, synthetic construct
  source 1..20: mol_type = other RNA
tgaatgaactgaggcaaatt

SEQ ID NO: 14424 - RNA, 20 nt, synthetic construct
  source 1..20: mol_type = other RNA
tgagacttccaagataatcc

SEQ ID NO: 14425 - RNA, 20 nt, synthetic construct
  source 1..20: mol_type = other RNA
tgagtgtggagaaaacaacc

SEQ ID NO: 14426 - RNA, 20 nt, synthetic construct
  source 1..20: mol_type = other RNA
tgagttgcttcctctatttg

SEQ ID NO: 14427 - RNA, 20 nt, synthetic construct
  source 1..20: mol_type = other RNA
tgatccatccaacagattca

SEQ ID NO: 14428 - RNA, 20 nt, synthetic construct
  source 1..20: mol_type = other RNA
tgatgagtgtggagaaaaca

SEQ ID NO: 14429 - RNA, 20 nt, synthetic construct
  source 1..20: mol_type = other RNA
tgattttatagagtataacc

SEQ ID NO: 14430 - RNA, 20 nt, synthetic construct
  source 1..20: mol_type = other RNA
tgcatatctatctcctttag

SEQ ID NO: 14431 - RNA, 20 nt, synthetic construct
  source 1..20: mol_type = other RNA
tgccaccaccagcctcctaa

SEQ ID NO: 14432 - RNA, 20 nt, synthetic construct
  source 1..20: mol_type = other RNA
tgcctcagttcattcaaagc

SEQ ID NO: 14433 - RNA, 20 nt, synthetic construct
  source 1..20: mol_type = other RNA
tgccttttaaatttgcctca

SEQ ID NO: 14434 - RNA, 20 nt, synthetic construct
  source 1..20: mol_type = other RNA
tgctcttggtttgttatatt

SEQ ID NO: 14435 - RNA, 20 nt, synthetic construct
  source 1..20: mol_type = other RNA
tgcttcctctatttggtttc

SEQ ID NO: 14436 - RNA, 20 nt, synthetic construct
  source 1..20: mol_type = other RNA
tggaaggttatactctataa

SEQ ID NO: 14437 - RNA, 20 nt, synthetic construct
  source 1..20: mol_type = other RNA
tggaagtctcaaaatggaag

SEQ ID NO: 14438 - RNA, 20 nt, synthetic construct
  source 1..20: mol_type = other RNA
tggagaaaacaacctaaatg

SEQ ID NO: 14439 - RNA, 20 nt, synthetic construct
  source 1..20: mol_type = other RNA
tggatcaacattttggttga

SEQ ID NO: 14440 - RNA, 20 nt, synthetic construct
  source 1..20: mol_type = other RNA
tggatggatcaacattttgg

SEQ ID NO: 14441 - RNA, 20 nt, synthetic construct
  source 1..20: mol_type = other RNA
tggcatgatgagtgtggaga

SEQ ID NO: 14442 - RNA, 20 nt, synthetic construct
  source 1..20: mol_type = other RNA
tggcttagattttgctcttg

SEQ ID NO: 14443 - RNA, 20 nt, synthetic construct
  source 1..20: mol_type = other RNA
tggtaaatataacaaaccaa

SEQ ID NO: 14444 - RNA, 20 nt, synthetic construct
  source 1..20: mol_type = other RNA
tggtggcatgatgagtgtgg

SEQ ID NO: 14445 - RNA, 20 nt, synthetic construct
  source 1..20: mol_type = other RNA
tggtggtggcatgatgagtg

SEQ ID NO: 14446 - RNA, 20 nt, synthetic construct
  source 1..20: mol_type = other RNA
tggttgattttatagagtat

SEQ ID NO: 14447 - RNA, 20 nt, synthetic construct
  source 1..20: mol_type = other RNA
tggtttgttatatttaccat

SEQ ID NO: 14448 - RNA, 20 nt, synthetic construct
  source 1..20: mol_type = other RNA
tgtggagaaaacaacctaaa

SEQ ID NO: 14449 - RNA, 20 nt, synthetic construct
  source 1..20: mol_type = other RNA
tgttatatttaccatttagg

SEQ ID NO: 14450 - RNA, 20 nt, synthetic construct
  source 1..20: mol_type = other RNA
tgttgatccatccaacagat

SEQ ID NO: 14451 - RNA, 20 nt, synthetic construct
  source 1..20: mol_type = other RNA
tgttggatggatcaacattt

SEQ ID NO: 14452 - RNA, 20 nt, synthetic construct
  source 1..20: mol_type = other RNA
tgttttctccacactcatca

SEQ ID NO: 14453 - RNA, 20 nt, synthetic construct
  source 1..20: mol_type = other RNA
ttaaattgcatatctatctc

SEQ ID NO: 14454 - RNA, 20 nt, synthetic construct
  source 1..20: mol_type = other RNA
ttaaatttgcctcagttcat

SEQ ID NO: 14455 - RNA, 20 nt, synthetic construct
  source 1..20: mol_type = other RNA
ttaaggaaaccaaatagagg

SEQ ID NO: 14456 - RNA, 20 nt, synthetic construct
  source 1..20: mol_type = other RNA
ttaccatttaggttgttttc

SEQ ID NO: 14457 - RNA, 20 nt, synthetic construct
  source 1..20: mol_type = other RNA
ttagattttgctcttggttt

SEQ ID NO: 14458 - RNA, 20 nt, synthetic construct
  source 1..20: mol_type = other RNA
ttaggaggctggtggtggca

SEQ ID NO: 14459 - RNA, 20 nt, synthetic construct
  source 1..20: mol_type = other RNA
ttaggttgttttctccacac

SEQ ID NO: 14460 - RNA, 20 nt, synthetic construct
  source 1..20: mol_type = other RNA
ttatactctataaaatcaac

SEQ ID NO: 14461 - RNA, 20 nt, synthetic construct
  source 1..20: mol_type = other RNA
ttatagagtataaccttcca

SEQ ID NO: 14462 - RNA, 20 nt, synthetic construct
  source 1..20: mol_type = other RNA
ttatatttaccatttaggtt

SEQ ID NO: 14463 - RNA, 20 nt, synthetic construct
  source 1..20: mol_type = other RNA
ttatcttggaagtctcaaaa

SEQ ID NO: 14464 - RNA, 20 nt, synthetic construct
  source 1..20: mol_type = other RNA
ttattgccttttaaatttgc

SEQ ID NO: 14465 - RNA, 20 nt, synthetic construct
  source 1..20: mol_type = other RNA
ttcaaagctttctgaatctg

SEQ ID NO: 14466 - RNA, 20 nt, synthetic construct
  source 1..20: mol_type = other RNA
ttcagaaagctttgaatgaa

SEQ ID NO: 14467 - RNA, 20 nt, synthetic construct
  source 1..20: mol_type = other RNA
ttcattcaaagctttctgaa

SEQ ID NO: 14468 - RNA, 20 nt, synthetic construct
  source 1..20: mol_type = other RNA
ttccaagataatcctcttct

SEQ ID NO: 14469 - RNA, 20 nt, synthetic construct
  source 1..20: mol_type = other RNA
ttccattttgagacttccaa

SEQ ID NO: 14470 - RNA, 20 nt, synthetic construct
  source 1..20: mol_type = other RNA
ttcctctatttggtttcctt

SEQ ID NO: 14471 - RNA, 20 nt, synthetic construct
  source 1..20: mol_type = other RNA
ttctccacactcatcatgcc

SEQ ID NO: 14472 - RNA, 20 nt, synthetic construct
  source 1..20: mol_type = other RNA
ttctcctctctggcttagat

SEQ ID NO: 14473 - RNA, 20 nt, synthetic construct
  source 1..20: mol_type = other RNA
ttctgaatctgttggatgga

SEQ ID NO: 14474 - RNA, 20 nt, synthetic construct
  source 1..20: mol_type = other RNA
ttgaatgaactgaggcaaat

SEQ ID NO: 14475 - RNA, 20 nt, synthetic construct
  source 1..20: mol_type = other RNA
ttgagacttccaagataatc

SEQ ID NO: 14476 - RNA, 20 nt, synthetic construct
  source 1..20: mol_type = other RNA
ttgatccatccaacagattc

SEQ ID NO: 14477 - RNA, 20 nt, synthetic construct
  source 1..20: mol_type = other RNA
ttgattttatagagtataac

SEQ ID NO: 14478 - RNA, 20 nt, synthetic construct
  source 1..20: mol_type = other RNA
ttgcatatctatctccttta

SEQ ID NO: 14479 - RNA, 20 nt, synthetic construct
  source 1..20: mol_type = other RNA
ttgcctcagttcattcaaag

SEQ ID NO: 14480 - RNA, 20 nt, synthetic construct
  source 1..20: mol_type = other RNA
ttgccttttaaatttgcctc

SEQ ID NO: 14481 - RNA, 20 nt, synthetic construct
  source 1..20: mol_type = other RNA
ttgctcttggtttgttatat

SEQ ID NO: 14482 - RNA, 20 nt, synthetic construct
  source 1..20: mol_type = other RNA
ttgcttcctctatttggttt

SEQ ID NO: 14483 - RNA, 20 nt, synthetic construct
  source 1..20: mol_type = other RNA
ttggaagtctcaaaatggaa

SEQ ID NO: 14484 - RNA, 20 nt, synthetic construct
  source 1..20: mol_type = other RNA
ttggatggatcaacattttg

SEQ ID NO: 14485 - RNA, 20 nt, synthetic construct
  source 1..20: mol_type = other RNA
ttggttgattttatagagta

SEQ ID NO: 14486 - RNA, 20 nt, synthetic construct
  source 1..20: mol_type = other RNA
ttggtttgttatatttacca

SEQ ID NO: 14487 - RNA, 20 nt, synthetic construct
  source 1..20: mol_type = other RNA
ttgttatatttaccatttag

SEQ ID NO: 14488 - RNA, 20 nt, synthetic construct
  source 1..20: mol_type = other RNA
ttgttttctccacactcatc

SEQ ID NO: 14489 - RNA, 20 nt, synthetic construct
  source 1..20: mol_type = other RNA
tttaaatttgcctcagttca

SEQ ID NO: 14490 - RNA, 20 nt, synthetic construct
  source 1..20: mol_type = other RNA
tttaaggaaaccaaatagag

SEQ ID NO: 14491 - RNA, 20 nt, synthetic construct
  source 1..20: mol_type = other RNA
tttaccatttaggttgtttt

SEQ ID NO: 14492 - RNA, 20 nt, synthetic construct
  source 1..20: mol_type = other RNA
tttaggaggctggtggtggc

SEQ ID NO: 14493 - RNA, 20 nt, synthetic construct
  source 1..20: mol_type = other RNA
tttaggttgttttctccaca

SEQ ID NO: 14494 - RNA, 20 nt, synthetic construct
  source 1..20: mol_type = other RNA
tttatagagtataaccttcc

SEQ ID NO: 14495 - RNA, 20 nt, synthetic construct
  source 1..20: mol_type = other RNA
tttctccacactcatcatgc

SEQ ID NO: 14496 - RNA, 20 nt, synthetic construct
  source 1..20: mol_type = other RNA
tttctgaatctgttggatgg

SEQ ID NO: 14497 - RNA, 20 nt, synthetic construct
  source 1..20: mol_type = other RNA
tttgaatgaactgaggcaaa

SEQ ID NO: 14498 - RNA, 20 nt, synthetic construct
  source 1..20: mol_type = other RNA
tttgagacttccaagataat

SEQ ID NO: 14499 - RNA, 20 nt, synthetic construct
  source 1..20: mol_type = other RNA
tttgcctcagttcattcaaa

SEQ ID NO: 14500 - RNA, 20 nt, synthetic construct
  source 1..20: mol_type = other RNA
tttgctcttggtttgttata

SEQ ID NO: 14501 - RNA, 20 nt, synthetic construct
  source 1..20: mol_type = other RNA
tttggttgattttatagagt

SEQ ID NO: 14502 - RNA, 20 nt, synthetic construct
  source 1..20: mol_type = other RNA
ttttaaatttgcctcagttc

SEQ ID NO: 14503 - RNA, 20 nt, synthetic construct
  source 1..20: mol_type = other RNA
ttttaaggaaaccaaataga

SEQ ID NO: 14504 - RNA, 20 nt, synthetic construct
  source 1..20: mol_type = other RNA
ttttatagagtataaccttc

SEQ ID NO: 14505 - RNA, 20 nt, synthetic construct
  source 1..20: mol_type = other RNA
ttttctccacactcatcatg

SEQ ID NO: 14506 - RNA, 20 nt, synthetic construct
  source 1..20: mol_type = other RNA
ttttgagacttccaagataa

SEQ ID NO: 14507 - RNA, 20 nt, synthetic construct
  source 1..20: mol_type = other RNA
ttttgctcttggtttgttat

SEQ ID NO: 14508 - RNA, 20 nt, synthetic construct
  source 1..20: mol_type = other RNA
ttttggttgattttatagag

SEQ ID NO: 14509 - RNA, 20 nt, synthetic construct
  source 1..20: mol_type = other RNA
tttttaaggaaaccaaatag

SEQ ID NO: 14510 - RNA, 20 nt, synthetic construct
  source 1..20: mol_type = other RNA
ttttttaaggaaaccaaata

SEQ ID NO: 14511 - RNA, 21 nt, synthetic construct
  source 1..21: mol_type = other RNA
aaaacaacctaaatggtaaat

SEQ ID NO: 14512 - RNA, 21 nt, synthetic construct
  source 1..21: mol_type = other RNA
aaaatcaaccaaaatgttgat

SEQ ID NO: 14513 - RNA, 21 nt, synthetic construct
  source 1..21: mol_type = other RNA
aaaatctaagccagagaggag

SEQ ID NO: 14514 - RNA, 21 nt, synthetic construct
  source 1..21: mol_type = other RNA
aaaatggaaggttatactcta

SEQ ID NO: 14515 - RNA, 21 nt, synthetic construct
  source 1..21: mol_type = other RNA
aaaatgttgatccatccaaca

SEQ ID NO: 14516 - RNA, 21 nt, synthetic construct
  source 1..21: mol_type = other RNA
aaacaacctaaatggtaaata

SEQ ID NO: 14517 - RNA, 21 nt, synthetic construct
  source 1..21: mol_type = other RNA
aaaccaagagcaaaatctaag

SEQ ID NO: 14518 - RNA, 21 nt, synthetic construct
  source 1..21: mol_type = other RNA
aaagctttctgaatctgttgg

SEQ ID NO: 14519 - RNA, 21 nt, synthetic construct
  source 1..21: mol_type = other RNA
aaagctttgaatgaactgagg

SEQ ID NO: 14520 - RNA, 21 nt, synthetic construct
  source 1..21: mol_type = other RNA
aaaggagatagatatgcaatt

SEQ ID NO: 14521 - RNA, 21 nt, synthetic construct
  source 1..21: mol_type = other RNA
aaatataacaaaccaagagca

SEQ ID NO: 14522 - RNA, 21 nt, synthetic construct
  source 1..21: mol_type = other RNA
aaatcaaccaaaatgttgatc

SEQ ID NO: 14523 - RNA, 21 nt, synthetic construct
  source 1..21: mol_type = other RNA
aaatctaagccagagaggaga

SEQ ID NO: 14524 - RNA, 21 nt, synthetic construct
  source 1..21: mol_type = other RNA
aaatggaaggttatactctat

SEQ ID NO: 14525 - RNA, 21 nt, synthetic construct
  source 1..21: mol_type = other RNA
aaatggtaaatataacaaacc

SEQ ID NO: 14526 - RNA, 21 nt, synthetic construct
  source 1..21: mol_type = other RNA
aaatgttgatccatccaacag

SEQ ID NO: 14527 - RNA, 21 nt, synthetic construct
  source 1..21: mol_type = other RNA
aaattgcatatctatctcctt

SEQ ID NO: 14528 - RNA, 21 nt, synthetic construct
  source 1..21: mol_type = other RNA
aaatttgcctcagttcattca

SEQ ID NO: 14529 - RNA, 21 nt, synthetic construct
  source 1..21: mol_type = other RNA
aacaaaccaagagcaaaatct

SEQ ID NO: 14530 - RNA, 21 nt, synthetic construct
  source 1..21: mol_type = other RNA
aacaacctaaatggtaaatat

SEQ ID NO: 14531 - RNA, 21 nt, synthetic construct
  source 1..21: mol_type = other RNA
aacagattcagaaagctttga

SEQ ID NO: 14532 - RNA, 21 nt, synthetic construct
  source 1..21: mol_type = other RNA
aaccaaaatgttgatccatcc

SEQ ID NO: 14533 - RNA, 21 nt, synthetic construct
  source 1..21: mol_type = other RNA
aaccaagagcaaaatctaagc

SEQ ID NO: 14534 - RNA, 21 nt, synthetic construct
  source 1..21: mol_type = other RNA
aacctaaatggtaaatataac

SEQ ID NO: 14535 - RNA, 21 nt, synthetic construct
  source 1..21: mol_type = other RNA
aaccttccattttgagacttc

SEQ ID NO: 14536 - RNA, 21 nt, synthetic construct
  source 1..21: mol_type = other RNA
aagagcaaaatctaagccaga

SEQ ID NO: 14537 - RNA, 21 nt, synthetic construct
  source 1..21: mol_type = other RNA
aagaggattatcttggaagtc

SEQ ID NO: 14538 - RNA, 21 nt, synthetic construct
  source 1..21: mol_type = other RNA
aagataatcctcttctcctct

SEQ ID NO: 14539 - RNA, 21 nt, synthetic construct
  source 1..21: mol_type = other RNA
aagccagagaggagaagagga

SEQ ID NO: 14540 - RNA, 21 nt, synthetic construct
  source 1..21: mol_type = other RNA
aagctttctgaatctgttgga

SEQ ID NO: 14541 - RNA, 21 nt, synthetic construct
  source 1..21: mol_type = other RNA
aagctttgaatgaactgaggc

SEQ ID NO: 14542 - RNA, 21 nt, synthetic construct
  source 1..21: mol_type = other RNA
aaggaaaccaaatagaggaag

SEQ ID NO: 14543 - RNA, 21 nt, synthetic construct
  source 1..21: mol_type = other RNA
aaggttatactctataaaatc

SEQ ID NO: 14544 - RNA, 21 nt, synthetic construct
  source 1..21: mol_type = other RNA
aagtctcaaaatggaaggtta

SEQ ID NO: 14545 - RNA, 21 nt, synthetic construct
  source 1..21: mol_type = other RNA
aatataacaaaccaagagcaa

SEQ ID NO: 14546 - RNA, 21 nt, synthetic construct
  source 1..21: mol_type = other RNA
aatcaaccaaaatgttgatcc

SEQ ID NO: 14547 - RNA, 21 nt, synthetic construct
  source 1..21: mol_type = other RNA
aatcctcttctcctctctggc

SEQ ID NO: 14548 - RNA, 21 nt, synthetic construct
  source 1..21: mol_type = other RNA
aatctaagccagagaggagaa

SEQ ID NO: 14549 - RNA, 21 nt, synthetic construct
  source 1..21: mol_type = other RNA
aatctgttggatggatcaaca

SEQ ID NO: 14550 - RNA, 21 nt, synthetic construct
  source 1..21: mol_type = other RNA
aatgaactgaggcaaatttaa

SEQ ID NO: 14551 - RNA, 21 nt, synthetic construct
  source 1..21: mol_type = other RNA
aatggaaggttatactctata

SEQ ID NO: 14552 - RNA, 21 nt, synthetic construct
  source 1..21: mol_type = other RNA
aatggtaaatataacaaacca

SEQ ID NO: 14553 - RNA, 21 nt, synthetic construct
  source 1..21: mol_type = other RNA
aatgttgatccatccaacaga

SEQ ID NO: 14554 - RNA, 21 nt, synthetic construct
  source 1..21: mol_type = other RNA
aattgcatatctatctccttt

SEQ ID NO: 14555 - RNA, 21 nt, synthetic construct
  source 1..21: mol_type = other RNA
aatttgcctcagttcattcaa

SEQ ID NO: 14556 - RNA, 21 nt, synthetic construct
  source 1..21: mol_type = other RNA
acaaaccaagagcaaaatcta

SEQ ID NO: 14557 - RNA, 21 nt, synthetic construct
  source 1..21: mol_type = other RNA
acaacctaaatggtaaatata

SEQ ID NO: 14558 - RNA, 21 nt, synthetic construct
  source 1..21: mol_type = other RNA
acactcatcatgccaccacca

SEQ ID NO: 14559 - RNA, 21 nt, synthetic construct
  source 1..21: mol_type = other RNA
acagattcagaaagctttgaa

SEQ ID NO: 14560 - RNA, 21 nt, synthetic construct
  source 1..21: mol_type = other RNA
acattttggttgattttatag

SEQ ID NO: 14561 - RNA, 21 nt, synthetic construct
  source 1..21: mol_type = other RNA
accaaaatgttgatccatcca

SEQ ID NO: 14562 - RNA, 21 nt, synthetic construct
  source 1..21: mol_type = other RNA
accaagagcaaaatctaagcc

SEQ ID NO: 14563 - RNA, 21 nt, synthetic construct
  source 1..21: mol_type = other RNA
accaccagcctcctaaaggag

SEQ ID NO: 14564 - RNA, 21 nt, synthetic construct
  source 1..21: mol_type = other RNA
accagcctcctaaaggagata

SEQ ID NO: 14565 - RNA, 21 nt, synthetic construct
  source 1..21: mol_type = other RNA
accatttaggttgttttctcc

SEQ ID NO: 14566 - RNA, 21 nt, synthetic construct
  source 1..21: mol_type = other RNA
acccattaaattgcatatcta

SEQ ID NO: 14567 - RNA, 21 nt, synthetic construct
  source 1..21: mol_type = other RNA
acctaaatggtaaatataaca

SEQ ID NO: 14568 - RNA, 21 nt, synthetic construct
  source 1..21: mol_type = other RNA
accttccattttgagacttcc

SEQ ID NO: 14569 - RNA, 21 nt, synthetic construct
  source 1..21: mol_type = other RNA
actcatcatgccaccaccagc

SEQ ID NO: 14570 - RNA, 21 nt, synthetic construct
  source 1..21: mol_type = other RNA
actctataaaatcaaccaaaa

SEQ ID NO: 14571 - RNA, 21 nt, synthetic construct
  source 1..21: mol_type = other RNA
acttccaagataatcctcttc

SEQ ID NO: 14572 - RNA, 21 nt, synthetic construct
  source 1..21: mol_type = other RNA
agaaaacaacctaaatggtaa

SEQ ID NO: 14573 - RNA, 21 nt, synthetic construct
  source 1..21: mol_type = other RNA
agaaagctttgaatgaactga

SEQ ID NO: 14574 - RNA, 21 nt, synthetic construct
  source 1..21: mol_type = other RNA
agaagaggattatcttggaag

SEQ ID NO: 14575 - RNA, 21 nt, synthetic construct
  source 1..21: mol_type = other RNA
agacttccaagataatcctct

SEQ ID NO: 14576 - RNA, 21 nt, synthetic construct
  source 1..21: mol_type = other RNA
agagaggagaagaggattatc

SEQ ID NO: 14577 - RNA, 21 nt, synthetic construct
  source 1..21: mol_type = other RNA
agagcaaaatctaagccagag

SEQ ID NO: 14578 - RNA, 21 nt, synthetic construct
  source 1..21: mol_type = other RNA
agaggagaagaggattatctt

SEQ ID NO: 14579 - RNA, 21 nt, synthetic construct
  source 1..21: mol_type = other RNA
agaggattatcttggaagtct

SEQ ID NO: 14580 - RNA, 21 nt, synthetic construct
  source 1..21: mol_type = other RNA
agagtataaccttccattttg

SEQ ID NO: 14581 - RNA, 21 nt, synthetic construct
  source 1..21: mol_type = other RNA
agataatcctcttctcctctc

SEQ ID NO: 14582 - RNA, 21 nt, synthetic construct
  source 1..21: mol_type = other RNA
agattcagaaagctttgaatg

SEQ ID NO: 14583 - RNA, 21 nt, synthetic construct
  source 1..21: mol_type = other RNA
agattttgctcttggtttgtt

SEQ ID NO: 14584 - RNA, 21 nt, synthetic construct
  source 1..21: mol_type = other RNA
agcaaaatctaagccagagag

SEQ ID NO: 14585 - RNA, 21 nt, synthetic construct
  source 1..21: mol_type = other RNA
agccagagaggagaagaggat

SEQ ID NO: 14586 - RNA, 21 nt, synthetic construct
  source 1..21: mol_type = other RNA
agcctcctaaaggagatagat

SEQ ID NO: 14587 - RNA, 21 nt, synthetic construct
  source 1..21: mol_type = other RNA
agctttctgaatctgttggat

SEQ ID NO: 14588 - RNA, 21 nt, synthetic construct
  source 1..21: mol_type = other RNA
agctttgaatgaactgaggca

SEQ ID NO: 14589 - RNA, 21 nt, synthetic construct
  source 1..21: mol_type = other RNA
aggaaaccaaatagaggaagc

SEQ ID NO: 14590 - RNA, 21 nt, synthetic construct
  source 1..21: mol_type = other RNA
aggagaagaggattatcttgg

SEQ ID NO: 14591 - RNA, 21 nt, synthetic construct
  source 1..21: mol_type = other RNA
aggaggctggtggtggcatga

SEQ ID NO: 14592 - RNA, 21 nt, synthetic construct
  source 1..21: mol_type = other RNA
aggattatcttggaagtctca

SEQ ID NO: 14593 - RNA, 21 nt, synthetic construct
  source 1..21: mol_type = other RNA
aggctggtggtggcatgatga

SEQ ID NO: 14594 - RNA, 21 nt, synthetic construct
  source 1..21: mol_type = other RNA
aggttatactctataaaatca

SEQ ID NO: 14595 - RNA, 21 nt, synthetic construct
  source 1..21: mol_type = other RNA
aggttgttttctccacactca

SEQ ID NO: 14596 - RNA, 21 nt, synthetic construct
  source 1..21: mol_type = other RNA
agtataaccttccattttgag

SEQ ID NO: 14597 - RNA, 21 nt, synthetic construct
  source 1..21: mol_type = other RNA
agtctcaaaatggaaggttat

SEQ ID NO: 14598 - RNA, 21 nt, synthetic construct
  source 1..21: mol_type = other RNA
agtgtggagaaaacaacctaa

SEQ ID NO: 14599 - RNA, 21 nt, synthetic construct
  source 1..21: mol_type = other RNA
agttcattcaaagctttctga

SEQ ID NO: 14600 - RNA, 21 nt, synthetic construct
  source 1..21: mol_type = other RNA
agttgcttcctctatttggtt

SEQ ID NO: 14601 - RNA, 21 nt, synthetic construct
  source 1..21: mol_type = other RNA
ataaaatcaaccaaaatgttg

SEQ ID NO: 14602 - RNA, 21 nt, synthetic construct
  source 1..21: mol_type = other RNA
ataacaaaccaagagcaaaat

SEQ ID NO: 14603 - RNA, 21 nt, synthetic construct
  source 1..21: mol_type = other RNA
ataaccttccattttgagact

SEQ ID NO: 14604 - RNA, 21 nt, synthetic construct
  source 1..21: mol_type = other RNA
ataatcctcttctcctctctg

SEQ ID NO: 14605 - RNA, 21 nt, synthetic construct
  source 1..21: mol_type = other RNA
atactctataaaatcaaccaa

SEQ ID NO: 14606 - RNA, 21 nt, synthetic construct
  source 1..21: mol_type = other RNA
atagagtataaccttccattt

SEQ ID NO: 14607 - RNA, 21 nt, synthetic construct
  source 1..21: mol_type = other RNA
atataacaaaccaagagcaaa

SEQ ID NO: 14608 - RNA, 21 nt, synthetic construct
  source 1..21: mol_type = other RNA
atatctatctcctttaggagg

SEQ ID NO: 14609 - RNA, 21 nt, synthetic construct
  source 1..21: mol_type = other RNA
atatttaccatttaggttgtt

SEQ ID NO: 14610 - RNA, 21 nt, synthetic construct
  source 1..21: mol_type = other RNA
atcaacattttggttgatttt

SEQ ID NO: 14611 - RNA, 21 nt, synthetic construct
  source 1..21: mol_type = other RNA
atcaaccaaaatgttgatcca

SEQ ID NO: 14612 - RNA, 21 nt, synthetic construct
  source 1..21: mol_type = other RNA
atcatgccaccaccagcctcc

SEQ ID NO: 14613 - RNA, 21 nt, synthetic construct
  source 1..21: mol_type = other RNA
atccaacagattcagaaagct

SEQ ID NO: 14614 - RNA, 21 nt, synthetic construct
  source 1..21: mol_type = other RNA
atccatccaacagattcagaa

SEQ ID NO: 14615 - RNA, 21 nt, synthetic construct
  source 1..21: mol_type = other RNA
atcctcttctcctctctggct

SEQ ID NO: 14616 - RNA, 21 nt, synthetic construct
  source 1..21: mol_type = other RNA
atctaagccagagaggagaag

SEQ ID NO: 14617 - RNA, 21 nt, synthetic construct
  source 1..21: mol_type = other RNA
atctatctcctttaggaggct

SEQ ID NO: 14618 - RNA, 21 nt, synthetic construct
  source 1..21: mol_type = other RNA
atctcctttaggaggctggtg

SEQ ID NO: 14619 - RNA, 21 nt, synthetic construct
  source 1..21: mol_type = other RNA
atctgttggatggatcaacat

SEQ ID NO: 14620 - RNA, 21 nt, synthetic construct
  source 1..21: mol_type = other RNA
atcttggaagtctcaaaatgg

SEQ ID NO: 14621 - RNA, 21 nt, synthetic construct
  source 1..21: mol_type = other RNA
atgaactgaggcaaatttaaa

SEQ ID NO: 14622 - RNA, 21 nt, synthetic construct
  source 1..21: mol_type = other RNA
atgagtgtggagaaaacaacc

SEQ ID NO: 14623 - RNA, 21 nt, synthetic construct
  source 1..21: mol_type = other RNA
atgagttgcttcctctatttg

SEQ ID NO: 14624 - RNA, 21 nt, synthetic construct
  source 1..21: mol_type = other RNA
atgatgagtgtggagaaaaca

SEQ ID NO: 14625 - RNA, 21 nt, synthetic construct
  source 1..21: mol_type = other RNA
atgccaccaccagcctcctaa

SEQ ID NO: 14626 - RNA, 21 nt, synthetic construct
  source 1..21: mol_type = other RNA
atggaaggttatactctataa

SEQ ID NO: 14627 - RNA, 21 nt, synthetic construct
  source 1..21: mol_type = other RNA
atggatcaacattttggttga

SEQ ID NO: 14628 - RNA, 21 nt, synthetic construct
  source 1..21: mol_type = other RNA
atggtaaatataacaaaccaa

SEQ ID NO: 14629 - RNA, 21 nt, synthetic construct
  source 1..21: mol_type = other RNA
atgttgatccatccaacagat

SEQ ID NO: 14630 - RNA, 21 nt, synthetic construct
  source 1..21: mol_type = other RNA
attaaattgcatatctatctc

SEQ ID NO: 14631 - RNA, 21 nt, synthetic construct
  source 1..21: mol_type = other RNA
attatcttggaagtctcaaaa

SEQ ID NO: 14632 - RNA, 21 nt, synthetic construct
  source 1..21: mol_type = other RNA
attattgccttttaaatttgc

SEQ ID NO: 14633 - RNA, 21 nt, synthetic construct
  source 1..21: mol_type = other RNA
attcaaagctttctgaatctg

SEQ ID NO: 14634 - RNA, 21 nt, synthetic construct
  source 1..21: mol_type = other RNA
attcagaaagctttgaatgaa

SEQ ID NO: 14635 - RNA, 21 nt, synthetic construct
  source 1..21: mol_type = other RNA
attgcatatctatctccttta

SEQ ID NO: 14636 - RNA, 21 nt, synthetic construct
  source 1..21: mol_type = other RNA
attgccttttaaatttgcctc

SEQ ID NO: 14637 - RNA, 21 nt, synthetic construct
  source 1..21: mol_type = other RNA
atttaccatttaggttgtttt

SEQ ID NO: 14638 - RNA, 21 nt, synthetic construct
  source 1..21: mol_type = other RNA
atttaggttgttttctccaca

SEQ ID NO: 14639 - RNA, 21 nt, synthetic construct
  source 1..21: mol_type = other RNA
atttgcctcagttcattcaaa

SEQ ID NO: 14640 - RNA, 21 nt, synthetic construct
  source 1..21: mol_type = other RNA
attttatagagtataaccttc

SEQ ID NO: 14641 - RNA, 21 nt, synthetic construct
  source 1..21: mol_type = other RNA
attttgagacttccaagataa

SEQ ID NO: 14642 - RNA, 21 nt, synthetic construct
  source 1..21: mol_type = other RNA
attttgctcttggtttgttat

SEQ ID NO: 14643 - RNA, 21 nt, synthetic construct
  source 1..21: mol_type = other RNA
attttggttgattttatagag

SEQ ID NO: 14644 - RNA, 21 nt, synthetic construct
  source 1..21: mol_type = other RNA
caaaatctaagccagagagga

SEQ ID NO: 14645 - RNA, 21 nt, synthetic construct
  source 1..21: mol_type = other RNA
caaaatggaaggttatactct

SEQ ID NO: 14646 - RNA, 21 nt, synthetic construct
  source 1..21: mol_type = other RNA
caaaatgttgatccatccaac

SEQ ID NO: 14647 - RNA, 21 nt, synthetic construct
  source 1..21: mol_type = other RNA
caaaccaagagcaaaatctaa

SEQ ID NO: 14648 - RNA, 21 nt, synthetic construct
  source 1..21: mol_type = other RNA
caaagctttctgaatctgttg

SEQ ID NO: 14649 - RNA, 21 nt, synthetic construct
  source 1..21: mol_type = other RNA
caacagattcagaaagctttg

SEQ ID NO: 14650 - RNA, 21 nt, synthetic construct
  source 1..21: mol_type = other RNA
caacattttggttgattttat

SEQ ID NO: 14651 - RNA, 21 nt, synthetic construct
  source 1..21: mol_type = other RNA
caaccaaaatgttgatccatc

SEQ ID NO: 14652 - RNA, 21 nt, synthetic construct
  source 1..21: mol_type = other RNA
caacctaaatggtaaatataa

SEQ ID NO: 14653 - RNA, 21 nt, synthetic construct
  source 1..21: mol_type = other RNA
caagagcaaaatctaagccag

SEQ ID NO: 14654 - RNA, 21 nt, synthetic construct
  source 1..21: mol_type = other RNA
caagataatcctcttctcctc

SEQ ID NO: 14655 - RNA, 21 nt, synthetic construct
  source 1..21: mol_type = other RNA
cacactcatcatgccaccacc

SEQ ID NO: 14656 - RNA, 21 nt, synthetic construct
  source 1..21: mol_type = other RNA
caccaccagcctcctaaagga

SEQ ID NO: 14657 - RNA, 21 nt, synthetic construct
  source 1..21: mol_type = other RNA
caccagcctcctaaaggagat

SEQ ID NO: 14658 - RNA, 21 nt, synthetic construct
  source 1..21: mol_type = other RNA
cactcatcatgccaccaccag

SEQ ID NO: 14659 - RNA, 21 nt, synthetic construct
  source 1..21: mol_type = other RNA
cagaaagctttgaatgaactg

SEQ ID NO: 14660 - RNA, 21 nt, synthetic construct
  source 1..21: mol_type = other RNA
cagagaggagaagaggattat

SEQ ID NO: 14661 - RNA, 21 nt, synthetic construct
  source 1..21: mol_type = other RNA
cagattcagaaagctttgaat

SEQ ID NO: 14662 - RNA, 21 nt, synthetic construct
  source 1..21: mol_type = other RNA
cagcctcctaaaggagataga

SEQ ID NO: 14663 - RNA, 21 nt, synthetic construct
  source 1..21: mol_type = other RNA
cagttcattcaaagctttctg

SEQ ID NO: 14664 - RNA, 21 nt, synthetic construct
  source 1..21: mol_type = other RNA
catatctatctcctttaggag

SEQ ID NO: 14665 - RNA, 21 nt, synthetic construct
  source 1..21: mol_type = other RNA
catcatgccaccaccagcctc

SEQ ID NO: 14666 - RNA, 21 nt, synthetic construct
  source 1..21: mol_type = other RNA
catccaacagattcagaaagc

SEQ ID NO: 14667 - RNA, 21 nt, synthetic construct
  source 1..21: mol_type = other RNA
catgatgagtgtggagaaaac

SEQ ID NO: 14668 - RNA, 21 nt, synthetic construct
  source 1..21: mol_type = other RNA
catgccaccaccagcctccta

SEQ ID NO: 14669 - RNA, 21 nt, synthetic construct
  source 1..21: mol_type = other RNA
cattaaattgcatatctatct

SEQ ID NO: 14670 - RNA, 21 nt, synthetic construct
  source 1..21: mol_type = other RNA
cattcaaagctttctgaatct

SEQ ID NO: 14671 - RNA, 21 nt, synthetic construct
  source 1..21: mol_type = other RNA
catttaggttgttttctccac

SEQ ID NO: 14672 - RNA, 21 nt, synthetic construct
  source 1..21: mol_type = other RNA
cattttgagacttccaagata

SEQ ID NO: 14673 - RNA, 21 nt, synthetic construct
  source 1..21: mol_type = other RNA
cattttggttgattttataga

SEQ ID NO: 14674 - RNA, 21 nt, synthetic construct
  source 1..21: mol_type = other RNA
ccaaaatgttgatccatccaa

SEQ ID NO: 14675 - RNA, 21 nt, synthetic construct
  source 1..21: mol_type = other RNA
ccaacagattcagaaagcttt

SEQ ID NO: 14676 - RNA, 21 nt, synthetic construct
  source 1..21: mol_type = other RNA
ccaagagcaaaatctaagcca

SEQ ID NO: 14677 - RNA, 21 nt, synthetic construct
  source 1..21: mol_type = other RNA
ccaagataatcctcttctcct

SEQ ID NO: 14678 - RNA, 21 nt, synthetic construct
  source 1..21: mol_type = other RNA
ccacactcatcatgccaccac

SEQ ID NO: 14679 - RNA, 21 nt, synthetic construct
  source 1..21: mol_type = other RNA
ccaccaccagcctcctaaagg

SEQ ID NO: 14680 - RNA, 21 nt, synthetic construct
  source 1..21: mol_type = other RNA
ccaccagcctcctaaaggaga

SEQ ID NO: 14681 - RNA, 21 nt, synthetic construct
  source 1..21: mol_type = other RNA
ccagagaggagaagaggatta

SEQ ID NO: 14682 - RNA, 21 nt, synthetic construct
  source 1..21: mol_type = other RNA
ccagcctcctaaaggagatag

SEQ ID NO: 14683 - RNA, 21 nt, synthetic construct
  source 1..21: mol_type = other RNA
ccatccaacagattcagaaag

SEQ ID NO: 14684 - RNA, 21 nt, synthetic construct
  source 1..21: mol_type = other RNA
ccattaaattgcatatctatc

SEQ ID NO: 14685 - RNA, 21 nt, synthetic construct
  source 1..21: mol_type = other RNA
ccatttaggttgttttctcca

SEQ ID NO: 14686 - RNA, 21 nt, synthetic construct
  source 1..21: mol_type = other RNA
ccattttgagacttccaagat

SEQ ID NO: 14687 - RNA, 21 nt, synthetic construct
  source 1..21: mol_type = other RNA
cccattaaattgcatatctat

SEQ ID NO: 14688 - RNA, 21 nt, synthetic construct
  source 1..21: mol_type = other RNA
cctaaaggagatagatatgca

SEQ ID NO: 14689 - RNA, 21 nt, synthetic construct
  source 1..21: mol_type = other RNA
cctaaatggtaaatataacaa

SEQ ID NO: 14690 - RNA, 21 nt, synthetic construct
  source 1..21: mol_type = other RNA
cctcagttcattcaaagcttt

SEQ ID NO: 14691 - RNA, 21 nt, synthetic construct
  source 1..21: mol_type = other RNA
cctcctaaaggagatagatat

SEQ ID NO: 14692 - RNA, 21 nt, synthetic construct
  source 1..21: mol_type = other RNA
cctctatttggtttccttaaa

SEQ ID NO: 14693 - RNA, 21 nt, synthetic construct
  source 1..21: mol_type = other RNA
cctctctggcttagattttgc

SEQ ID NO: 14694 - RNA, 21 nt, synthetic construct
  source 1..21: mol_type = other RNA
cctcttctcctctctggctta

SEQ ID NO: 14695 - RNA, 21 nt, synthetic construct
  source 1..21: mol_type = other RNA
ccttccattttgagacttcca

SEQ ID NO: 14696 - RNA, 21 nt, synthetic construct
  source 1..21: mol_type = other RNA
cctttaggaggctggtggtgg

SEQ ID NO: 14697 - RNA, 21 nt, synthetic construct
  source 1..21: mol_type = other RNA
ccttttaaatttgcctcagtt

SEQ ID NO: 14698 - RNA, 21 nt, synthetic construct
  source 1..21: mol_type = other RNA
ctaaaggagatagatatgcaa

SEQ ID NO: 14699 - RNA, 21 nt, synthetic construct
  source 1..21: mol_type = other RNA
ctaagccagagaggagaagag

SEQ ID NO: 14700 - RNA, 21 nt, synthetic construct
  source 1..21: mol_type = other RNA
ctataaaatcaaccaaaatgt

SEQ ID NO: 14701 - RNA, 21 nt, synthetic construct
  source 1..21: mol_type = other RNA
ctatctcctttaggaggctgg

SEQ ID NO: 14702 - RNA, 21 nt, synthetic construct
  source 1..21: mol_type = other RNA
ctatttggtttccttaaaaaa

SEQ ID NO: 14703 - RNA, 21 nt, synthetic construct
  source 1..21: mol_type = other RNA
ctcaaaatggaaggttatact

SEQ ID NO: 14704 - RNA, 21 nt, synthetic construct
  source 1..21: mol_type = other RNA
ctcagttcattcaaagctttc

SEQ ID NO: 14705 - RNA, 21 nt, synthetic construct
  source 1..21: mol_type = other RNA
ctcatcatgccaccaccagcc

SEQ ID NO: 14706 - RNA, 21 nt, synthetic construct
  source 1..21: mol_type = other RNA
ctccacactcatcatgccacc

SEQ ID NO: 14707 - RNA, 21 nt, synthetic construct
  source 1..21: mol_type = other RNA
ctcctaaaggagatagatatg

SEQ ID NO: 14708 - RNA, 21 nt, synthetic construct
  source 1..21: mol_type = other RNA
ctcctctctggcttagatttt

SEQ ID NO: 14709 - RNA, 21 nt, synthetic construct
  source 1..21: mol_type = other RNA
ctcctttaggaggctggtggt

SEQ ID NO: 14710 - RNA, 21 nt, synthetic construct
  source 1..21: mol_type = other RNA
ctctataaaatcaaccaaaat

SEQ ID NO: 14711 - RNA, 21 nt, synthetic construct
  source 1..21: mol_type = other RNA
ctctatttggtttccttaaaa

SEQ ID NO: 14712 - RNA, 21 nt, synthetic construct
  source 1..21: mol_type = other RNA
ctctctggcttagattttgct

SEQ ID NO: 14713 - RNA, 21 nt, synthetic construct
  source 1..21: mol_type = other RNA
ctctggcttagattttgctct

SEQ ID NO: 14714 - RNA, 21 nt, synthetic construct
  source 1..21: mol_type = other RNA
ctcttctcctctctggcttag

SEQ ID NO: 14715 - RNA, 21 nt, synthetic construct
  source 1..21: mol_type = other RNA
ctcttggtttgttatatttac

SEQ ID NO: 14716 - RNA, 21 nt, synthetic construct
  source 1..21: mol_type = other RNA
ctgaatctgttggatggatca

SEQ ID NO: 14717 - RNA, 21 nt, synthetic construct
  source 1..21: mol_type = other RNA
ctggcttagattttgctcttg

SEQ ID NO: 14718 - RNA, 21 nt, synthetic construct
  source 1..21: mol_type = other RNA
ctggtggtggcatgatgagtg

SEQ ID NO: 14719 - RNA, 21 nt, synthetic construct
  source 1..21: mol_type = other RNA
ctgttggatggatcaacattt

SEQ ID NO: 14720 - RNA, 21 nt, synthetic construct
  source 1..21: mol_type = other RNA
cttagattttgctcttggttt

SEQ ID NO: 14721 - RNA, 21 nt, synthetic construct
  source 1..21: mol_type = other RNA
cttccaagataatcctcttct

SEQ ID NO: 14722 - RNA, 21 nt, synthetic construct
  source 1..21: mol_type = other RNA
cttccattttgagacttccaa

SEQ ID NO: 14723 - RNA, 21 nt, synthetic construct
  source 1..21: mol_type = other RNA
cttcctctatttggtttcctt

SEQ ID NO: 14724 - RNA, 21 nt, synthetic construct
  source 1..21: mol_type = other RNA
cttctcctctctggcttagat

SEQ ID NO: 14725 - RNA, 21 nt, synthetic construct
  source 1..21: mol_type = other RNA
cttggaagtctcaaaatggaa

SEQ ID NO: 14726 - RNA, 21 nt, synthetic construct
  source 1..21: mol_type = other RNA
cttggtttgttatatttacca

SEQ ID NO: 14727 - RNA, 21 nt, synthetic construct
  source 1..21: mol_type = other RNA
ctttaggaggctggtggtggc

SEQ ID NO: 14728 - RNA, 21 nt, synthetic construct
  source 1..21: mol_type = other RNA
ctttctgaatctgttggatgg

SEQ ID NO: 14729 - RNA, 21 nt, synthetic construct
  source 1..21: mol_type = other RNA
ctttgaatgaactgaggcaaa

SEQ ID NO: 14730 - RNA, 21 nt, synthetic construct
  source 1..21: mol_type = other RNA
cttttaaatttgcctcagttc

SEQ ID NO: 14731 - RNA, 21 nt, synthetic construct
  source 1..21: mol_type = other RNA
gaaaacaacctaaatggtaaa

SEQ ID NO: 14732 - RNA, 21 nt, synthetic construct
  source 1..21: mol_type = other RNA
gaaagctttgaatgaactgag

SEQ ID NO: 14733 - RNA, 21 nt, synthetic construct
  source 1..21: mol_type = other RNA
gaactgaggcaaatttaaaag

SEQ ID NO: 14734 - RNA, 21 nt, synthetic construct
  source 1..21: mol_type = other RNA
gaagaggattatcttggaagt

SEQ ID NO: 14735 - RNA, 21 nt, synthetic construct
  source 1..21: mol_type = other RNA
gaaggttatactctataaaat

SEQ ID NO: 14736 - RNA, 21 nt, synthetic construct
  source 1..21: mol_type = other RNA
gaagtctcaaaatggaaggtt

SEQ ID NO: 14737 - RNA, 21 nt, synthetic construct
  source 1..21: mol_type = other RNA
gaatctgttggatggatcaac

SEQ ID NO: 14738 - RNA, 21 nt, synthetic construct
  source 1..21: mol_type = other RNA
gaatgaactgaggcaaattta

SEQ ID NO: 14739 - RNA, 21 nt, synthetic construct
  source 1..21: mol_type = other RNA
gacttccaagataatcctctt

SEQ ID NO: 14740 - RNA, 21 nt, synthetic construct
  source 1..21: mol_type = other RNA
gagaaaacaacctaaatggta

SEQ ID NO: 14741 - RNA, 21 nt, synthetic construct
  source 1..21: mol_type = other RNA
gagaagaggattatcttggaa

SEQ ID NO: 14742 - RNA, 21 nt, synthetic construct
  source 1..21: mol_type = other RNA
gagacttccaagataatcctc

SEQ ID NO: 14743 - RNA, 21 nt, synthetic construct
  source 1..21: mol_type = other RNA
gagaggagaagaggattatct

SEQ ID NO: 14744 - RNA, 21 nt, synthetic construct
  source 1..21: mol_type = other RNA
gagcaaaatctaagccagaga

SEQ ID NO: 14745 - RNA, 21 nt, synthetic construct
  source 1..21: mol_type = other RNA
gaggagaagaggattatcttg

SEQ ID NO: 14746 - RNA, 21 nt, synthetic construct
  source 1..21: mol_type = other RNA
gaggattatcttggaagtctc

SEQ ID NO: 14747 - RNA, 21 nt, synthetic construct
  source 1..21: mol_type = other RNA
gaggctggtggtggcatgatg

SEQ ID NO: 14748 - RNA, 21 nt, synthetic construct
  source 1..21: mol_type = other RNA
gagtataaccttccattttga

SEQ ID NO: 14749 - RNA, 21 nt, synthetic construct
  source 1..21: mol_type = other RNA
gagtgtggagaaaacaaccta

SEQ ID NO: 14750 - RNA, 21 nt, synthetic construct
  source 1..21: mol_type = other RNA
gagttgcttcctctatttggt

SEQ ID NO: 14751 - RNA, 21 nt, synthetic construct
  source 1..21: mol_type = other RNA
gataatcctcttctcctctct

SEQ ID NO: 14752 - RNA, 21 nt, synthetic construct
  source 1..21: mol_type = other RNA
gatcaacattttggttgattt

SEQ ID NO: 14753 - RNA, 21 nt, synthetic construct
  source 1..21: mol_type = other RNA
gatccatccaacagattcaga

SEQ ID NO: 14754 - RNA, 21 nt, synthetic construct
  source 1..21: mol_type = other RNA
gatgagtgtggagaaaacaac

SEQ ID NO: 14755 - RNA, 21 nt, synthetic construct
  source 1..21: mol_type = other RNA
gatggatcaacattttggttg

SEQ ID NO: 14756 - RNA, 21 nt, synthetic construct
  source 1..21: mol_type = other RNA
gattatcttggaagtctcaaa

SEQ ID NO: 14757 - RNA, 21 nt, synthetic construct
  source 1..21: mol_type = other RNA
gattcagaaagctttgaatga

SEQ ID NO: 14758 - RNA, 21 nt, synthetic construct
  source 1..21: mol_type = other RNA
gattttatagagtataacctt

SEQ ID NO: 14759 - RNA, 21 nt, synthetic construct
  source 1..21: mol_type = other RNA
gattttgctcttggtttgtta

SEQ ID NO: 14760 - RNA, 21 nt, synthetic construct
  source 1..21: mol_type = other RNA
gcaaaatctaagccagagagg

SEQ ID NO: 14761 - RNA, 21 nt, synthetic construct
  source 1..21: mol_type = other RNA
gcatatctatctcctttagga

SEQ ID NO: 14762 - RNA, 21 nt, synthetic construct
  source 1..21: mol_type = other RNA
gcatgatgagtgtggagaaaa

SEQ ID NO: 14763 - RNA, 21 nt, synthetic construct
  source 1..21: mol_type = other RNA
gccaccaccagcctcctaaag

SEQ ID NO: 14764 - RNA, 21 nt, synthetic construct
  source 1..21: mol_type = other RNA
gccagagaggagaagaggatt

SEQ ID NO: 14765 - RNA, 21 nt, synthetic construct
  source 1..21: mol_type = other RNA
gcctcagttcattcaaagctt

SEQ ID NO: 14766 - RNA, 21 nt, synthetic construct
  source 1..21: mol_type = other RNA
gcctcctaaaggagatagata

SEQ ID NO: 14767 - RNA, 21 nt, synthetic construct
  source 1..21: mol_type = other RNA
gccttttaaatttgcctcagt

SEQ ID NO: 14768 - RNA, 21 nt, synthetic construct
  source 1..21: mol_type = other RNA
gctcttggtttgttatattta

SEQ ID NO: 14769 - RNA, 21 nt, synthetic construct
  source 1..21: mol_type = other RNA
gctggtggtggcatgatgagt

SEQ ID NO: 14770 - RNA, 21 nt, synthetic construct
  source 1..21: mol_type = other RNA
gcttagattttgctcttggtt

SEQ ID NO: 14771 - RNA, 21 nt, synthetic construct
  source 1..21: mol_type = other RNA
gcttcctctatttggtttcct

SEQ ID NO: 14772 - RNA, 21 nt, synthetic construct
  source 1..21: mol_type = other RNA
gctttctgaatctgttggatg

SEQ ID NO: 14773 - RNA, 21 nt, synthetic construct
  source 1..21: mol_type = other RNA
gctttgaatgaactgaggcaa

SEQ ID NO: 14774 - RNA, 21 nt, synthetic construct
  source 1..21: mol_type = other RNA
ggaaggttatactctataaaa

SEQ ID NO: 14775 - RNA, 21 nt, synthetic construct
  source 1..21: mol_type = other RNA
ggaagtctcaaaatggaaggt

SEQ ID NO: 14776 - RNA, 21 nt, synthetic construct
  source 1..21: mol_type = other RNA
ggagaaaacaacctaaatggt

SEQ ID NO: 14777 - RNA, 21 nt, synthetic construct
  source 1..21: mol_type = other RNA
ggagaagaggattatcttgga

SEQ ID NO: 14778 - RNA, 21 nt, synthetic construct
  source 1..21: mol_type = other RNA
ggaggctggtggtggcatgat

SEQ ID NO: 14779 - RNA, 21 nt, synthetic construct
  source 1..21: mol_type = other RNA
ggatcaacattttggttgatt

SEQ ID NO: 14780 - RNA, 21 nt, synthetic construct
  source 1..21: mol_type = other RNA
ggatggatcaacattttggtt

SEQ ID NO: 14781 - RNA, 21 nt, synthetic construct
  source 1..21: mol_type = other RNA
ggattatcttggaagtctcaa

SEQ ID NO: 14782 - RNA, 21 nt, synthetic construct
  source 1..21: mol_type = other RNA
ggcatgatgagtgtggagaaa

SEQ ID NO: 14783 - RNA, 21 nt, synthetic construct
  source 1..21: mol_type = other RNA
ggctggtggtggcatgatgag

SEQ ID NO: 14784 - RNA, 21 nt, synthetic construct
  source 1..21: mol_type = other RNA
ggcttagattttgctcttggt

SEQ ID NO: 14785 - RNA, 21 nt, synthetic construct
  source 1..21: mol_type = other RNA
ggtaaatataacaaaccaaga

SEQ ID NO: 14786 - RNA, 21 nt, synthetic construct
  source 1..21: mol_type = other RNA
ggtggcatgatgagtgtggag

SEQ ID NO: 14787 - RNA, 21 nt, synthetic construct
  source 1..21: mol_type = other RNA
ggtggtggcatgatgagtgtg

SEQ ID NO: 14788 - RNA, 21 nt, synthetic construct
  source 1..21: mol_type = other RNA
ggttatactctataaaatcaa

SEQ ID NO: 14789 - RNA, 21 nt, synthetic construct
  source 1..21: mol_type = other RNA
ggttgattttatagagtataa

SEQ ID NO: 14790 - RNA, 21 nt, synthetic construct
  source 1..21: mol_type = other RNA
ggttgttttctccacactcat

SEQ ID NO: 14791 - RNA, 21 nt, synthetic construct
  source 1..21: mol_type = other RNA
ggtttgttatatttaccattt

SEQ ID NO: 14792 - RNA, 21 nt, synthetic construct
  source 1..21: mol_type = other RNA
gtaaatataacaaaccaagag

SEQ ID NO: 14793 - RNA, 21 nt, synthetic construct
  source 1..21: mol_type = other RNA
gtataaccttccattttgaga

SEQ ID NO: 14794 - RNA, 21 nt, synthetic construct
  source 1..21: mol_type = other RNA
gtctcaaaatggaaggttata

SEQ ID NO: 14795 - RNA, 21 nt, synthetic construct
  source 1..21: mol_type = other RNA
gtggagaaaacaacctaaatg

SEQ ID NO: 14796 - RNA, 21 nt, synthetic construct
  source 1..21: mol_type = other RNA
gtggcatgatgagtgtggaga

SEQ ID NO: 14797 - RNA, 21 nt, synthetic construct
  source 1..21: mol_type = other RNA
gtggtggcatgatgagtgtgg

SEQ ID NO: 14798 - RNA, 21 nt, synthetic construct
  source 1..21: mol_type = other RNA
gtgtggagaaaacaacctaaa

SEQ ID NO: 14799 - RNA, 21 nt, synthetic construct
  source 1..21: mol_type = other RNA
gttatactctataaaatcaac

SEQ ID NO: 14800 - RNA, 21 nt, synthetic construct
  source 1..21: mol_type = other RNA
gttatatttaccatttaggtt

SEQ ID NO: 14801 - RNA, 21 nt, synthetic construct
  source 1..21: mol_type = other RNA
gttcattcaaagctttctgaa

SEQ ID NO: 14802 - RNA, 21 nt, synthetic construct
  source 1..21: mol_type = other RNA
gttgatccatccaacagattc

SEQ ID NO: 14803 - RNA, 21 nt, synthetic construct
  source 1..21: mol_type = other RNA
gttgattttatagagtataac

SEQ ID NO: 14804 - RNA, 21 nt, synthetic construct
  source 1..21: mol_type = other RNA
gttgcttcctctatttggttt

SEQ ID NO: 14805 - RNA, 21 nt, synthetic construct
  source 1..21: mol_type = other RNA
gttggatggatcaacattttg

SEQ ID NO: 14806 - RNA, 21 nt, synthetic construct
  source 1..21: mol_type = other RNA
gttgttttctccacactcatc

SEQ ID NO: 14807 - RNA, 21 nt, synthetic construct
  source 1..21: mol_type = other RNA
gttttctccacactcatcatg

SEQ ID NO: 14808 - RNA, 21 nt, synthetic construct
  source 1..21: mol_type = other RNA
taaaatcaaccaaaatgttga

SEQ ID NO: 14809 - RNA, 21 nt, synthetic construct
  source 1..21: mol_type = other RNA
taaaggagatagatatgcaat

SEQ ID NO: 14810 - RNA, 21 nt, synthetic construct
  source 1..21: mol_type = other RNA
taaatataacaaaccaagagc

SEQ ID NO: 14811 - RNA, 21 nt, synthetic construct
  source 1..21: mol_type = other RNA
taaattgcatatctatctcct

SEQ ID NO: 14812 - RNA, 21 nt, synthetic construct
  source 1..21: mol_type = other RNA
taaatttgcctcagttcattc

SEQ ID NO: 14813 - RNA, 21 nt, synthetic construct
  source 1..21: mol_type = other RNA
taacaaaccaagagcaaaatc

SEQ ID NO: 14814 - RNA, 21 nt, synthetic construct
  source 1..21: mol_type = other RNA
taaccttccattttgagactt

SEQ ID NO: 14815 - RNA, 21 nt, synthetic construct
  source 1..21: mol_type = other RNA
taagccagagaggagaagagg

SEQ ID NO: 14816 - RNA, 21 nt, synthetic construct
  source 1..21: mol_type = other RNA
taaggaaaccaaatagaggaa

SEQ ID NO: 14817 - RNA, 21 nt, synthetic construct
  source 1..21: mol_type = other RNA
taatcctcttctcctctctgg

SEQ ID NO: 14818 - RNA, 21 nt, synthetic construct
  source 1..21: mol_type = other RNA
taccatttaggttgttttctc

SEQ ID NO: 14819 - RNA, 21 nt, synthetic construct
  source 1..21: mol_type = other RNA
tactctataaaatcaaccaaa

SEQ ID NO: 14820 - RNA, 21 nt, synthetic construct
  source 1..21: mol_type = other RNA
tagagtataaccttccatttt

SEQ ID NO: 14821 - RNA, 21 nt, synthetic construct
  source 1..21: mol_type = other RNA
tagattttgctcttggtttgt

SEQ ID NO: 14822 - RNA, 21 nt, synthetic construct
  source 1..21: mol_type = other RNA
taggaggctggtggtggcatg

SEQ ID NO: 14823 - RNA, 21 nt, synthetic construct
  source 1..21: mol_type = other RNA
taggttgttttctccacactc

SEQ ID NO: 14824 - RNA, 21 nt, synthetic construct
  source 1..21: mol_type = other RNA
tataacaaaccaagagcaaaa

SEQ ID NO: 14825 - RNA, 21 nt, synthetic construct
  source 1..21: mol_type = other RNA
tataaccttccattttgagac

SEQ ID NO: 14826 - RNA, 21 nt, synthetic construct
  source 1..21: mol_type = other RNA
tatactctataaaatcaacca

SEQ ID NO: 14827 - RNA, 21 nt, synthetic construct
  source 1..21: mol_type = other RNA
tatagagtataaccttccatt

SEQ ID NO: 14828 - RNA, 21 nt, synthetic construct
  source 1..21: mol_type = other RNA
tatatttaccatttaggttgt

SEQ ID NO: 14829 - RNA, 21 nt, synthetic construct
  source 1..21: mol_type = other RNA
tatctatctcctttaggaggc

SEQ ID NO: 14830 - RNA, 21 nt, synthetic construct
  source 1..21: mol_type = other RNA
tatctcctttaggaggctggt

SEQ ID NO: 14831 - RNA, 21 nt, synthetic construct
  source 1..21: mol_type = other RNA
tatcttggaagtctcaaaatg

SEQ ID NO: 14832 - RNA, 21 nt, synthetic construct
  source 1..21: mol_type = other RNA
tatgagttgcttcctctattt

SEQ ID NO: 14833 - RNA, 21 nt, synthetic construct
  source 1..21: mol_type = other RNA
tattgccttttaaatttgcct

SEQ ID NO: 14834 - RNA, 21 nt, synthetic construct
  source 1..21: mol_type = other RNA
tatttaccatttaggttgttt

SEQ ID NO: 14835 - RNA, 21 nt, synthetic construct
  source 1..21: mol_type = other RNA
tcaaaatggaaggttatactc

SEQ ID NO: 14836 - RNA, 21 nt, synthetic construct
  source 1..21: mol_type = other RNA
tcaaagctttctgaatctgtt

SEQ ID NO: 14837 - RNA, 21 nt, synthetic construct
  source 1..21: mol_type = other RNA
tcaacattttggttgatttta

SEQ ID NO: 14838 - RNA, 21 nt, synthetic construct
  source 1..21: mol_type = other RNA
tcaaccaaaatgttgatccat

SEQ ID NO: 14839 - RNA, 21 nt, synthetic construct
  source 1..21: mol_type = other RNA
tcagaaagctttgaatgaact

SEQ ID NO: 14840 - RNA, 21 nt, synthetic construct
  source 1..21: mol_type = other RNA
tcagttcattcaaagctttct

SEQ ID NO: 14841 - RNA, 21 nt, synthetic construct
  source 1..21: mol_type = other RNA
tcatcatgccaccaccagcct

SEQ ID NO: 14842 - RNA, 21 nt, synthetic construct
  source 1..21: mol_type = other RNA
tcatgccaccaccagcctcct

SEQ ID NO: 14843 - RNA, 21 nt, synthetic construct
  source 1..21: mol_type = other RNA
tcattcaaagctttctgaatc

SEQ ID NO: 14844 - RNA, 21 nt, synthetic construct
  source 1..21: mol_type = other RNA
tccaacagattcagaaagctt

SEQ ID NO: 14845 - RNA, 21 nt, synthetic construct
  source 1..21: mol_type = other RNA
tccaagataatcctcttctcc

SEQ ID NO: 14846 - RNA, 21 nt, synthetic construct
  source 1..21: mol_type = other RNA
tccacactcatcatgccacca

SEQ ID NO: 14847 - RNA, 21 nt, synthetic construct
  source 1..21: mol_type = other RNA
tccatccaacagattcagaaa

SEQ ID NO: 14848 - RNA, 21 nt, synthetic construct
  source 1..21: mol_type = other RNA
tccattttgagacttccaaga

SEQ ID NO: 14849 - RNA, 21 nt, synthetic construct
  source 1..21: mol_type = other RNA
tcctaaaggagatagatatgc

SEQ ID NO: 14850 - RNA, 21 nt, synthetic construct
  source 1..21: mol_type = other RNA
tcctctatttggtttccttaa

SEQ ID NO: 14851 - RNA, 21 nt, synthetic construct
  source 1..21: mol_type = other RNA
tcctctctggcttagattttg

SEQ ID NO: 14852 - RNA, 21 nt, synthetic construct
  source 1..21: mol_type = other RNA
tcctcttctcctctctggctt

SEQ ID NO: 14853 - RNA, 21 nt, synthetic construct
  source 1..21: mol_type = other RNA
tcctttaggaggctggtggtg

SEQ ID NO: 14854 - RNA, 21 nt, synthetic construct
  source 1..21: mol_type = other RNA
tctaagccagagaggagaaga

SEQ ID NO: 14855 - RNA, 21 nt, synthetic construct
  source 1..21: mol_type = other RNA
tctataaaatcaaccaaaatg

SEQ ID NO: 14856 - RNA, 21 nt, synthetic construct
  source 1..21: mol_type = other RNA
tctatctcctttaggaggctg

SEQ ID NO: 14857 - RNA, 21 nt, synthetic construct
  source 1..21: mol_type = other RNA
tctatttggtttccttaaaaa

SEQ ID NO: 14858 - RNA, 21 nt, synthetic construct
  source 1..21: mol_type = other RNA
tctcaaaatggaaggttatac

SEQ ID NO: 14859 - RNA, 21 nt, synthetic construct
  source 1..21: mol_type = other RNA
tctccacactcatcatgccac

SEQ ID NO: 14860 - RNA, 21 nt, synthetic construct
  source 1..21: mol_type = other RNA
tctcctctctggcttagattt

SEQ ID NO: 14861 - RNA, 21 nt, synthetic construct
  source 1..21: mol_type = other RNA
tctcctttaggaggctggtgg

SEQ ID NO: 14862 - RNA, 21 nt, synthetic construct
  source 1..21: mol_type = other RNA
tctctggcttagattttgctc

SEQ ID NO: 14863 - RNA, 21 nt, synthetic construct
  source 1..21: mol_type = other RNA
tctgaatctgttggatggatc

SEQ ID NO: 14864 - RNA, 21 nt, synthetic construct
  source 1..21: mol_type = other RNA
tctggcttagattttgctctt

SEQ ID NO: 14865 - RNA, 21 nt, synthetic construct
  source 1..21: mol_type = other RNA
tctgttggatggatcaacatt

SEQ ID NO: 14866 - RNA, 21 nt, synthetic construct
  source 1..21: mol_type = other RNA
tcttctcctctctggcttaga

SEQ ID NO: 14867 - RNA, 21 nt, synthetic construct
  source 1..21: mol_type = other RNA
tcttggaagtctcaaaatgga

SEQ ID NO: 14868 - RNA, 21 nt, synthetic construct
  source 1..21: mol_type = other RNA
tcttggtttgttatatttacc

SEQ ID NO: 14869 - RNA, 21 nt, synthetic construct
  source 1..21: mol_type = other RNA
tgaactgaggcaaatttaaaa

SEQ ID NO: 14870 - RNA, 21 nt, synthetic construct
  source 1..21: mol_type = other RNA
tgaatctgttggatggatcaa

SEQ ID NO: 14871 - RNA, 21 nt, synthetic construct
  source 1..21: mol_type = other RNA
tgaatgaactgaggcaaattt

SEQ ID NO: 14872 - RNA, 21 nt, synthetic construct
  source 1..21: mol_type = other RNA
tgagacttccaagataatcct

SEQ ID NO: 14873 - RNA, 21 nt, synthetic construct
  source 1..21: mol_type = other RNA
tgagtgtggagaaaacaacct

SEQ ID NO: 14874 - RNA, 21 nt, synthetic construct
  source 1..21: mol_type = other RNA
tgagttgcttcctctatttgg

SEQ ID NO: 14875 - RNA, 21 nt, synthetic construct
  source 1..21: mol_type = other RNA
tgatccatccaacagattcag

SEQ ID NO: 14876 - RNA, 21 nt, synthetic construct
  source 1..21: mol_type = other RNA
tgatgagtgtggagaaaacaa

SEQ ID NO: 14877 - RNA, 21 nt, synthetic construct
  source 1..21: mol_type = other RNA
tgattttatagagtataacct

SEQ ID NO: 14878 - RNA, 21 nt, synthetic construct
  source 1..21: mol_type = other RNA
tgcatatctatctcctttagg

SEQ ID NO: 14879 - RNA, 21 nt, synthetic construct
  source 1..21: mol_type = other RNA
tgccaccaccagcctcctaaa

SEQ ID NO: 14880 - RNA, 21 nt, synthetic construct
  source 1..21: mol_type = other RNA
tgcctcagttcattcaaagct

SEQ ID NO: 14881 - RNA, 21 nt, synthetic construct
  source 1..21: mol_type = other RNA
tgccttttaaatttgcctcag

SEQ ID NO: 14882 - RNA, 21 nt, synthetic construct
  source 1..21: mol_type = other RNA
tgctcttggtttgttatattt

SEQ ID NO: 14883 - RNA, 21 nt, synthetic construct
  source 1..21: mol_type = other RNA
tgcttcctctatttggtttcc

SEQ ID NO: 14884 - RNA, 21 nt, synthetic construct
  source 1..21: mol_type = other RNA
tggaaggttatactctataaa

SEQ ID NO: 14885 - RNA, 21 nt, synthetic construct
  source 1..21: mol_type = other RNA
tggaagtctcaaaatggaagg

SEQ ID NO: 14886 - RNA, 21 nt, synthetic construct
  source 1..21: mol_type = other RNA
tggagaaaacaacctaaatgg

SEQ ID NO: 14887 - RNA, 21 nt, synthetic construct
  source 1..21: mol_type = other RNA
tggatcaacattttggttgat

SEQ ID NO: 14888 - RNA, 21 nt, synthetic construct
  source 1..21: mol_type = other RNA
tggatggatcaacattttggt

SEQ ID NO: 14889 - RNA, 21 nt, synthetic construct
  source 1..21: mol_type = other RNA
tggcatgatgagtgtggagaa

SEQ ID NO: 14890 - RNA, 21 nt, synthetic construct
  source 1..21: mol_type = other RNA
tggcttagattttgctcttgg

SEQ ID NO: 14891 - RNA, 21 nt, synthetic construct
  source 1..21: mol_type = other RNA
tggtaaatataacaaaccaag

SEQ ID NO: 14892 - RNA, 21 nt, synthetic construct
  source 1..21: mol_type = other RNA
tggtggcatgatgagtgtgga

SEQ ID NO: 14893 - RNA, 21 nt, synthetic construct
  source 1..21: mol_type = other RNA
tggtggtggcatgatgagtgt

SEQ ID NO: 14894 - RNA, 21 nt, synthetic construct
  source 1..21: mol_type = other RNA
tggttgattttatagagtata

SEQ ID NO: 14895 - RNA, 21 nt, synthetic construct
  source 1..21: mol_type = other RNA
tggtttgttatatttaccatt

SEQ ID NO: 14896 - RNA, 21 nt, synthetic construct
  source 1..21: mol_type = other RNA
tgtggagaaaacaacctaaat

SEQ ID NO: 14897 - RNA, 21 nt, synthetic construct
  source 1..21: mol_type = other RNA
tgttatatttaccatttaggt

SEQ ID NO: 14898 - RNA, 21 nt, synthetic construct
  source 1..21: mol_type = other RNA
tgttgatccatccaacagatt

SEQ ID NO: 14899 - RNA, 21 nt, synthetic construct
  source 1..21: mol_type = other RNA
tgttggatggatcaacatttt

SEQ ID NO: 14900 - RNA, 21 nt, synthetic construct
  source 1..21: mol_type = other RNA
tgttttctccacactcatcat

SEQ ID NO: 14901 - RNA, 21 nt, synthetic construct
  source 1..21: mol_type = other RNA
ttaaattgcatatctatctcc

SEQ ID NO: 14902 - RNA, 21 nt, synthetic construct
  source 1..21: mol_type = other RNA
ttaaatttgcctcagttcatt

SEQ ID NO: 14903 - RNA, 21 nt, synthetic construct
  source 1..21: mol_type = other RNA
ttaaggaaaccaaatagagga

SEQ ID NO: 14904 - RNA, 21 nt, synthetic construct
  source 1..21: mol_type = other RNA
ttaccatttaggttgttttct

SEQ ID NO: 14905 - RNA, 21 nt, synthetic construct
  source 1..21: mol_type = other RNA
ttagattttgctcttggtttg

SEQ ID NO: 14906 - RNA, 21 nt, synthetic construct
  source 1..21: mol_type = other RNA
ttaggaggctggtggtggcat

SEQ ID NO: 14907 - RNA, 21 nt, synthetic construct
  source 1..21: mol_type = other RNA
ttaggttgttttctccacact

SEQ ID NO: 14908 - RNA, 21 nt, synthetic construct
  source 1..21: mol_type = other RNA
ttatactctataaaatcaacc

SEQ ID NO: 14909 - RNA, 21 nt, synthetic construct
  source 1..21: mol_type = other RNA
ttatagagtataaccttccat

SEQ ID NO: 14910 - RNA, 21 nt, synthetic construct
  source 1..21: mol_type = other RNA
ttatatttaccatttaggttg

SEQ ID NO: 14911 - RNA, 21 nt, synthetic construct
  source 1..21: mol_type = other RNA
ttatcttggaagtctcaaaat

SEQ ID NO: 14912 - RNA, 21 nt, synthetic construct
  source 1..21: mol_type = other RNA
ttattgccttttaaatttgcc

SEQ ID NO: 14913 - RNA, 21 nt, synthetic construct
  source 1..21: mol_type = other RNA
ttcaaagctttctgaatctgt

SEQ ID NO: 14914 - RNA, 21 nt, synthetic construct
  source 1..21: mol_type = other RNA
ttcagaaagctttgaatgaac

SEQ ID NO: 14915 - RNA, 21 nt, synthetic construct
  source 1..21: mol_type = other RNA
ttcattcaaagctttctgaat

SEQ ID NO: 14916 - RNA, 21 nt, synthetic construct
  source 1..21: mol_type = other RNA
ttccaagataatcctcttctc

SEQ ID NO: 14917 - RNA, 21 nt, synthetic construct
  source 1..21: mol_type = other RNA
ttccattttgagacttccaag

SEQ ID NO: 14918 - RNA, 21 nt, synthetic construct
  source 1..21: mol_type = other RNA
ttcctctatttggtttcctta

SEQ ID NO: 14919 - RNA, 21 nt, synthetic construct
  source 1..21: mol_type = other RNA
ttctccacactcatcatgcca

SEQ ID NO: 14920 - RNA, 21 nt, synthetic construct
  source 1..21: mol_type = other RNA
ttctcctctctggcttagatt

SEQ ID NO: 14921 - RNA, 21 nt, synthetic construct
  source 1..21: mol_type = other RNA
ttctgaatctgttggatggat

SEQ ID NO: 14922 - RNA, 21 nt, synthetic construct
  source 1..21: mol_type = other RNA
ttgaatgaactgaggcaaatt

SEQ ID NO: 14923 - RNA, 21 nt, synthetic construct
  source 1..21: mol_type = other RNA
ttgagacttccaagataatcc

SEQ ID NO: 14924 - RNA, 21 nt, synthetic construct
  source 1..21: mol_type = other RNA
ttgatccatccaacagattca

SEQ ID NO: 14925 - RNA, 21 nt, synthetic construct
  source 1..21: mol_type = other RNA
ttgattttatagagtataacc

SEQ ID NO: 14926 - RNA, 21 nt, synthetic construct
  source 1..21: mol_type = other RNA
ttgcatatctatctcctttag

SEQ ID NO: 14927 - RNA, 21 nt, synthetic construct
  source 1..21: mol_type = other RNA
ttgcctcagttcattcaaagc

SEQ ID NO: 14928 - RNA, 21 nt, synthetic construct
  source 1..21: mol_type = other RNA
ttgccttttaaatttgcctca

SEQ ID NO: 14929 - RNA, 21 nt, synthetic construct
  source 1..21: mol_type = other RNA
ttgctcttggtttgttatatt

SEQ ID NO: 14930 - RNA, 21 nt, synthetic construct
  source 1..21: mol_type = other RNA
ttgcttcctctatttggtttc

SEQ ID NO: 14931 - RNA, 21 nt, synthetic construct
  source 1..21: mol_type = other RNA
ttggaagtctcaaaatggaag

SEQ ID NO: 14932 - RNA, 21 nt, synthetic construct
  source 1..21: mol_type = other RNA
ttggatggatcaacattttgg

SEQ ID NO: 14933 - RNA, 21 nt, synthetic construct
  source 1..21: mol_type = other RNA
ttggttgattttatagagtat

SEQ ID NO: 14934 - RNA, 21 nt, synthetic construct
  source 1..21: mol_type = other RNA
ttggtttgttatatttaccat

SEQ ID NO: 14935 - RNA, 21 nt, synthetic construct
  source 1..21: mol_type = other RNA
ttgttatatttaccatttagg

SEQ ID NO: 14936 - RNA, 21 nt, synthetic construct
  source 1..21: mol_type = other RNA
ttgttttctccacactcatca

SEQ ID NO: 14937 - RNA, 21 nt, synthetic construct
  source 1..21: mol_type = other RNA
tttaaatttgcctcagttcat

SEQ ID NO: 14938 - RNA, 21 nt, synthetic construct
  source 1..21: mol_type = other RNA
tttaaggaaaccaaatagagg

SEQ ID NO: 14939 - RNA, 21 nt, synthetic construct
  source 1..21: mol_type = other RNA
tttaccatttaggttgttttc

SEQ ID NO: 14940 - RNA, 21 nt, synthetic construct
  source 1..21: mol_type = other RNA
tttaggaggctggtggtggca

SEQ ID NO: 14941 - RNA, 21 nt, synthetic construct
  source 1..21: mol_type = other RNA
tttaggttgttttctccacac

SEQ ID NO: 14942 - RNA, 21 nt, synthetic construct
  source 1..21: mol_type = other RNA
tttatagagtataaccttcca

SEQ ID NO: 14943 - RNA, 21 nt, synthetic construct
  source 1..21: mol_type = other RNA
tttctccacactcatcatgcc

SEQ ID NO: 14944 - RNA, 21 nt, synthetic construct
  source 1..21: mol_type = other RNA
tttctgaatctgttggatgga

SEQ ID NO: 14945 - RNA, 21 nt, synthetic construct
  source 1..21: mol_type = other RNA
tttgaatgaactgaggcaaat

SEQ ID NO: 14946 - RNA, 21 nt, synthetic construct
  source 1..21: mol_type = other RNA
tttgagacttccaagataatc

SEQ ID NO: 14947 - RNA, 21 nt, synthetic construct
  source 1..21: mol_type = other RNA
tttgcctcagttcattcaaag

SEQ ID NO: 14948 - RNA, 21 nt, synthetic construct
  source 1..21: mol_type = other RNA
tttgctcttggtttgttatat

SEQ ID NO: 14949 - RNA, 21 nt, synthetic construct
  source 1..21: mol_type = other RNA
tttggttgattttatagagta

SEQ ID NO: 14950 - RNA, 21 nt, synthetic construct
  source 1..21: mol_type = other RNA
ttttaaatttgcctcagttca

SEQ ID NO: 14951 - RNA, 21 nt, synthetic construct
  source 1..21: mol_type = other RNA
ttttaaggaaaccaaatagag

SEQ ID NO: 14952 - RNA, 21 nt, synthetic construct
  source 1..21: mol_type = other RNA
ttttatagagtataaccttcc

SEQ ID NO: 14953 - RNA, 21 nt, synthetic construct
  source 1..21: mol_type = other RNA
ttttctccacactcatcatgc

SEQ ID NO: 14954 - RNA, 21 nt, synthetic construct
  source 1..21: mol_type = other RNA
ttttgagacttccaagataat

SEQ ID NO: 14955 - RNA, 21 nt, synthetic construct
  source 1..21: mol_type = other RNA
ttttgctcttggtttgttata

SEQ ID NO: 14956 - RNA, 21 nt, synthetic construct
  source 1..21: mol_type = other RNA
ttttggttgattttatagagt

SEQ ID NO: 14957 - RNA, 21 nt, synthetic construct
  source 1..21: mol_type = other RNA
tttttaaggaaaccaaataga

SEQ ID NO: 14958 - RNA, 21 nt, synthetic construct
  source 1..21: mol_type = other RNA
ttttttaaggaaaccaaatag

SEQ ID NO: 14959 - RNA, 22 nt, synthetic construct
  source 1..22: mol_type = other RNA
aaaacaacctaaatggtaaata

SEQ ID NO: 14960 - RNA, 22 nt, synthetic construct
  source 1..22: mol_type = other RNA
aaaatcaaccaaaatgttgatc

SEQ ID NO: 14961 - RNA, 22 nt, synthetic construct
  source 1..22: mol_type = other RNA
aaaatctaagccagagaggaga

SEQ ID NO: 14962 - RNA, 22 nt, synthetic construct
  source 1..22: mol_type = other RNA
aaaatggaaggttatactctat

SEQ ID NO: 14963 - RNA, 22 nt, synthetic construct
  source 1..22: mol_type = other RNA
aaaatgttgatccatccaacag

SEQ ID NO: 14964 - RNA, 22 nt, synthetic construct
  source 1..22: mol_type = other RNA
aaacaacctaaatggtaaatat

SEQ ID NO: 14965 - RNA, 22 nt, synthetic construct
  source 1..22: mol_type = other RNA
aaaccaagagcaaaatctaagc

SEQ ID NO: 14966 - RNA, 22 nt, synthetic construct
  source 1..22: mol_type = other RNA
aaagctttctgaatctgttgga

SEQ ID NO: 14967 - RNA, 22 nt, synthetic construct
  source 1..22: mol_type = other RNA
aaagctttgaatgaactgaggc

SEQ ID NO: 14968 - RNA, 22 nt, synthetic construct
  source 1..22: mol_type = other RNA
aaatataacaaaccaagagcaa

SEQ ID NO: 14969 - RNA, 22 nt, synthetic construct
  source 1..22: mol_type = other RNA
aaatcaaccaaaatgttgatcc

SEQ ID NO: 14970 - RNA, 22 nt, synthetic construct
  source 1..22: mol_type = other RNA
aaatctaagccagagaggagaa

SEQ ID NO: 14971 - RNA, 22 nt, synthetic construct
  source 1..22: mol_type = other RNA
aaatggaaggttatactctata

SEQ ID NO: 14972 - RNA, 22 nt, synthetic construct
  source 1..22: mol_type = other RNA
aaatggtaaatataacaaacca

SEQ ID NO: 14973 - RNA, 22 nt, synthetic construct
  source 1..22: mol_type = other RNA
aaatgttgatccatccaacaga

SEQ ID NO: 14974 - RNA, 22 nt, synthetic construct
  source 1..22: mol_type = other RNA
aaattgcatatctatctccttt

SEQ ID NO: 14975 - RNA, 22 nt, synthetic construct
  source 1..22: mol_type = other RNA
aaatttgcctcagttcattcaa

SEQ ID NO: 14976 - RNA, 22 nt, synthetic construct
  source 1..22: mol_type = other RNA
aacaaaccaagagcaaaatcta

SEQ ID NO: 14977 - RNA, 22 nt, synthetic construct
  source 1..22: mol_type = other RNA
aacaacctaaatggtaaatata

SEQ ID NO: 14978 - RNA, 22 nt, synthetic construct
  source 1..22: mol_type = other RNA
aacagattcagaaagctttgaa

SEQ ID NO: 14979 - RNA, 22 nt, synthetic construct
  source 1..22: mol_type = other RNA
aacattttggttgattttatag

SEQ ID NO: 14980 - RNA, 22 nt, synthetic construct
  source 1..22: mol_type = other RNA
aaccaaaatgttgatccatcca

SEQ ID NO: 14981 - RNA, 22 nt, synthetic construct
  source 1..22: mol_type = other RNA
aaccaagagcaaaatctaagcc

SEQ ID NO: 14982 - RNA, 22 nt, synthetic construct
  source 1..22: mol_type = other RNA
aacctaaatggtaaatataaca

SEQ ID NO: 14983 - RNA, 22 nt, synthetic construct
  source 1..22: mol_type = other RNA
aaccttccattttgagacttcc

SEQ ID NO: 14984 - RNA, 22 nt, synthetic construct
  source 1..22: mol_type = other RNA
aagagcaaaatctaagccagag

SEQ ID NO: 14985 - RNA, 22 nt, synthetic construct
  source 1..22: mol_type = other RNA
aagaggattatcttggaagtct

SEQ ID NO: 14986 - RNA, 22 nt, synthetic construct
  source 1..22: mol_type = other RNA
aagataatcctcttctcctctc

SEQ ID NO: 14987 - RNA, 22 nt, synthetic construct
  source 1..22: mol_type = other RNA
aagccagagaggagaagaggat

SEQ ID NO: 14988 - RNA, 22 nt, synthetic construct
  source 1..22: mol_type = other RNA
aagctttctgaatctgttggat

SEQ ID NO: 14989 - RNA, 22 nt, synthetic construct
  source 1..22: mol_type = other RNA
aagctttgaatgaactgaggca

SEQ ID NO: 14990 - RNA, 22 nt, synthetic construct
  source 1..22: mol_type = other RNA
aaggaaaccaaatagaggaagc

SEQ ID NO: 14991 - RNA, 22 nt, synthetic construct
  source 1..22: mol_type = other RNA
aaggttatactctataaaatca

SEQ ID NO: 14992 - RNA, 22 nt, synthetic construct
  source 1..22: mol_type = other RNA
aagtctcaaaatggaaggttat

SEQ ID NO: 14993 - RNA, 22 nt, synthetic construct
  source 1..22: mol_type = other RNA
aatataacaaaccaagagcaaa

SEQ ID NO: 14994 - RNA, 22 nt, synthetic construct
  source 1..22: mol_type = other RNA
aatcaaccaaaatgttgatcca

SEQ ID NO: 14995 - RNA, 22 nt, synthetic construct
  source 1..22: mol_type = other RNA
aatcctcttctcctctctggct

SEQ ID NO: 14996 - RNA, 22 nt, synthetic construct
  source 1..22: mol_type = other RNA
aatctaagccagagaggagaag

SEQ ID NO: 14997 - RNA, 22 nt, synthetic construct
  source 1..22: mol_type = other RNA
aatctgttggatggatcaacat

SEQ ID NO: 14998 - RNA, 22 nt, synthetic construct
  source 1..22: mol_type = other RNA
aatgaactgaggcaaatttaaa

SEQ ID NO: 14999 - RNA, 22 nt, synthetic construct
  source 1..22: mol_type = other RNA
aatggaaggttatactctataa

SEQ ID NO: 15000 - RNA, 22 nt, synthetic construct
  source 1..22: mol_type = other RNA
aatggtaaatataacaaaccaa

SEQ ID NO: 15001 - RNA, 22 nt, synthetic construct
  source 1..22: mol_type = other RNA
aatgttgatccatccaacagat

SEQ ID NO: 15002 - RNA, 22 nt, synthetic construct
  source 1..22: mol_type = other RNA
aattattgccttttaaatttgc

SEQ ID NO: 15003 - RNA, 22 nt, synthetic construct
  source 1..22: mol_type = other RNA
aattgcatatctatctccttta

SEQ ID NO: 15004 - RNA, 22 nt, synthetic construct
  source 1..22: mol_type = other RNA
aatttgcctcagttcattcaaa

SEQ ID NO: 15005 - RNA, 22 nt, synthetic construct
  source 1..22: mol_type = other RNA
acaaaccaagagcaaaatctaa

SEQ ID NO: 15006 - RNA, 22 nt, synthetic construct
  source 1..22: mol_type = other RNA
acaacctaaatggtaaatataa

SEQ ID NO: 15007 - RNA, 22 nt, synthetic construct
  source 1..22: mol_type = other RNA
acactcatcatgccaccaccag

SEQ ID NO: 15008 - RNA, 22 nt, synthetic construct
  source 1..22: mol_type = other RNA
acagattcagaaagctttgaat

SEQ ID NO: 15009 - RNA, 22 nt, synthetic construct
  source 1..22: mol_type = other RNA
acattttggttgattttataga

SEQ ID NO: 15010 - RNA, 22 nt, synthetic construct
  source 1..22: mol_type = other RNA
accaaaatgttgatccatccaa

SEQ ID NO: 15011 - RNA, 22 nt, synthetic construct
  source 1..22: mol_type = other RNA
accaagagcaaaatctaagcca

SEQ ID NO: 15012 - RNA, 22 nt, synthetic construct
  source 1..22: mol_type = other RNA
accaccagcctcctaaaggaga

SEQ ID NO: 15013 - RNA, 22 nt, synthetic construct
  source 1..22: mol_type = other RNA
accagcctcctaaaggagatag

SEQ ID NO: 15014 - RNA, 22 nt, synthetic construct
  source 1..22: mol_type = other RNA
accatttaggttgttttctcca

SEQ ID NO: 15015 - RNA, 22 nt, synthetic construct
  source 1..22: mol_type = other RNA
acccattaaattgcatatctat

SEQ ID NO: 15016 - RNA, 22 nt, synthetic construct
  source 1..22: mol_type = other RNA
acctaaatggtaaatataacaa

SEQ ID NO: 15017 - RNA, 22 nt, synthetic construct
  source 1..22: mol_type = other RNA
accttccattttgagacttcca

SEQ ID NO: 15018 - RNA, 22 nt, synthetic construct
  source 1..22: mol_type = other RNA
actcatcatgccaccaccagcc

SEQ ID NO: 15019 - RNA, 22 nt, synthetic construct
  source 1..22: mol_type = other RNA
actctataaaatcaaccaaaat

SEQ ID NO: 15020 - RNA, 22 nt, synthetic construct
  source 1..22: mol_type = other RNA
acttccaagataatcctcttct

SEQ ID NO: 15021 - RNA, 22 nt, synthetic construct
  source 1..22: mol_type = other RNA
agaaaacaacctaaatggtaaa

SEQ ID NO: 15022 - RNA, 22 nt, synthetic construct
  source 1..22: mol_type = other RNA
agaaagctttgaatgaactgag

SEQ ID NO: 15023 - RNA, 22 nt, synthetic construct
  source 1..22: mol_type = other RNA
agaagaggattatcttggaagt

SEQ ID NO: 15024 - RNA, 22 nt, synthetic construct
  source 1..22: mol_type = other RNA
agacttccaagataatcctctt

SEQ ID NO: 15025 - RNA, 22 nt, synthetic construct
  source 1..22: mol_type = other RNA
agagaggagaagaggattatct

SEQ ID NO: 15026 - RNA, 22 nt, synthetic construct
  source 1..22: mol_type = other RNA
agagcaaaatctaagccagaga

SEQ ID NO: 15027 - RNA, 22 nt, synthetic construct
  source 1..22: mol_type = other RNA
agaggagaagaggattatcttg

SEQ ID NO: 15028 - RNA, 22 nt, synthetic construct
  source 1..22: mol_type = other RNA
agaggattatcttggaagtctc

SEQ ID NO: 15029 - RNA, 22 nt, synthetic construct
  source 1..22: mol_type = other RNA
agagtataaccttccattttga

SEQ ID NO: 15030 - RNA, 22 nt, synthetic construct
  source 1..22: mol_type = other RNA
agataatcctcttctcctctct

SEQ ID NO: 15031 - RNA, 22 nt, synthetic construct
  source 1..22: mol_type = other RNA
agattcagaaagctttgaatga

SEQ ID NO: 15032 - RNA, 22 nt, synthetic construct
  source 1..22: mol_type = other RNA
agattttgctcttggtttgtta

SEQ ID NO: 15033 - RNA, 22 nt, synthetic construct
  source 1..22: mol_type = other RNA
agcaaaatctaagccagagagg

SEQ ID NO: 15034 - RNA, 22 nt, synthetic construct
  source 1..22: mol_type = other RNA
agccagagaggagaagaggatt

SEQ ID NO: 15035 - RNA, 22 nt, synthetic construct
  source 1..22: mol_type = other RNA
agcctcctaaaggagatagata

SEQ ID NO: 15036 - RNA, 22 nt, synthetic construct
  source 1..22: mol_type = other RNA
agctttctgaatctgttggatg

SEQ ID NO: 15037 - RNA, 22 nt, synthetic construct
  source 1..22: mol_type = other RNA
agctttgaatgaactgaggcaa

SEQ ID NO: 15038 - RNA, 22 nt, synthetic construct
  source 1..22: mol_type = other RNA
aggaaaccaaatagaggaagca

SEQ ID NO: 15039 - RNA, 22 nt, synthetic construct
  source 1..22: mol_type = other RNA
aggagaagaggattatcttgga

SEQ ID NO: 15040 - RNA, 22 nt, synthetic construct
  source 1..22: mol_type = other RNA
aggaggctggtggtggcatgat

SEQ ID NO: 15041 - RNA, 22 nt, synthetic construct
  source 1..22: mol_type = other RNA
aggattatcttggaagtctcaa

SEQ ID NO: 15042 - RNA, 22 nt, synthetic construct
  source 1..22: mol_type = other RNA
aggctggtggtggcatgatgag

SEQ ID NO: 15043 - RNA, 22 nt, synthetic construct
  source 1..22: mol_type = other RNA
aggttatactctataaaatcaa

SEQ ID NO: 15044 - RNA, 22 nt, synthetic construct
  source 1..22: mol_type = other RNA
aggttgttttctccacactcat

SEQ ID NO: 15045 - RNA, 22 nt, synthetic construct
  source 1..22: mol_type = other RNA
agtataaccttccattttgaga

SEQ ID NO: 15046 - RNA, 22 nt, synthetic construct
  source 1..22: mol_type = other RNA
agtctcaaaatggaaggttata

SEQ ID NO: 15047 - RNA, 22 nt, synthetic construct
  source 1..22: mol_type = other RNA
agtgtggagaaaacaacctaaa

SEQ ID NO: 15048 - RNA, 22 nt, synthetic construct
  source 1..22: mol_type = other RNA
agttcattcaaagctttctgaa

SEQ ID NO: 15049 - RNA, 22 nt, synthetic construct
  source 1..22: mol_type = other RNA
agttgcttcctctatttggttt

SEQ ID NO: 15050 - RNA, 22 nt, synthetic construct
  source 1..22: mol_type = other RNA
ataaaatcaaccaaaatgttga

SEQ ID NO: 15051 - RNA, 22 nt, synthetic construct
  source 1..22: mol_type = other RNA
ataacaaaccaagagcaaaatc

SEQ ID NO: 15052 - RNA, 22 nt, synthetic construct
  source 1..22: mol_type = other RNA
ataaccttccattttgagactt

SEQ ID NO: 15053 - RNA, 22 nt, synthetic construct
  source 1..22: mol_type = other RNA
ataatcctcttctcctctctgg

SEQ ID NO: 15054 - RNA, 22 nt, synthetic construct
  source 1..22: mol_type = other RNA
atactctataaaatcaaccaaa

SEQ ID NO: 15055 - RNA, 22 nt, synthetic construct
  source 1..22: mol_type = other RNA
atagagtataaccttccatttt

SEQ ID NO: 15056 - RNA, 22 nt, synthetic construct
  source 1..22: mol_type = other RNA
atataacaaaccaagagcaaaa

SEQ ID NO: 15057 - RNA, 22 nt, synthetic construct
  source 1..22: mol_type = other RNA
atatctatctcctttaggaggc

SEQ ID NO: 15058 - RNA, 22 nt, synthetic construct
  source 1..22: mol_type = other RNA
atatgagttgcttcctctattt

SEQ ID NO: 15059 - RNA, 22 nt, synthetic construct
  source 1..22: mol_type = other RNA
atatttaccatttaggttgttt

SEQ ID NO: 15060 - RNA, 22 nt, synthetic construct
  source 1..22: mol_type = other RNA
atcaacattttggttgatttta

SEQ ID NO: 15061 - RNA, 22 nt, synthetic construct
  source 1..22: mol_type = other RNA
atcaaccaaaatgttgatccat

SEQ ID NO: 15062 - RNA, 22 nt, synthetic construct
  source 1..22: mol_type = other RNA
atcatgccaccaccagcctcct

SEQ ID NO: 15063 - RNA, 22 nt, synthetic construct
  source 1..22: mol_type = other RNA
atccaacagattcagaaagctt

SEQ ID NO: 15064 - RNA, 22 nt, synthetic construct
  source 1..22: mol_type = other RNA
atccatccaacagattcagaaa

SEQ ID NO: 15065 - RNA, 22 nt, synthetic construct
  source 1..22: mol_type = other RNA
atcctcttctcctctctggctt

SEQ ID NO: 15066 - RNA, 22 nt, synthetic construct
  source 1..22: mol_type = other RNA
atctaagccagagaggagaaga

SEQ ID NO: 15067 - RNA, 22 nt, synthetic construct
  source 1..22: mol_type = other RNA
atctatctcctttaggaggctg

SEQ ID NO: 15068 - RNA, 22 nt, synthetic construct
  source 1..22: mol_type = other RNA
atctcctttaggaggctggtgg

SEQ ID NO: 15069 - RNA, 22 nt, synthetic construct
  source 1..22: mol_type = other RNA
atctgttggatggatcaacatt

SEQ ID NO: 15070 - RNA, 22 nt, synthetic construct
  source 1..22: mol_type = other RNA
atcttggaagtctcaaaatgga

SEQ ID NO: 15071 - RNA, 22 nt, synthetic construct
  source 1..22: mol_type = other RNA
atgaactgaggcaaatttaaaa

SEQ ID NO: 15072 - RNA, 22 nt, synthetic construct
  source 1..22: mol_type = other RNA
atgagtgtggagaaaacaacct

SEQ ID NO: 15073 - RNA, 22 nt, synthetic construct
  source 1..22: mol_type = other RNA
atgagttgcttcctctatttgg

SEQ ID NO: 15074 - RNA, 22 nt, synthetic construct
  source 1..22: mol_type = other RNA
atgatgagtgtggagaaaacaa

SEQ ID NO: 15075 - RNA, 22 nt, synthetic construct
  source 1..22: mol_type = other RNA
atgccaccaccagcctcctaaa

SEQ ID NO: 15076 - RNA, 22 nt, synthetic construct
  source 1..22: mol_type = other RNA
atggaaggttatactctataaa

SEQ ID NO: 15077 - RNA, 22 nt, synthetic construct
  source 1..22: mol_type = other RNA
atggatcaacattttggttgat

SEQ ID NO: 15078 - RNA, 22 nt, synthetic construct
  source 1..22: mol_type = other RNA
atggtaaatataacaaaccaag

SEQ ID NO: 15079 - RNA, 22 nt, synthetic construct
  source 1..22: mol_type = other RNA
atgttgatccatccaacagatt

SEQ ID NO: 15080 - RNA, 22 nt, synthetic construct
  source 1..22: mol_type = other RNA
attaaattgcatatctatctcc

SEQ ID NO: 15081 - RNA, 22 nt, synthetic construct
  source 1..22: mol_type = other RNA
attatcttggaagtctcaaaat

SEQ ID NO: 15082 - RNA, 22 nt, synthetic construct
  source 1..22: mol_type = other RNA
attattgccttttaaatttgcc

SEQ ID NO: 15083 - RNA, 22 nt, synthetic construct
  source 1..22: mol_type = other RNA
attcaaagctttctgaatctgt

SEQ ID NO: 15084 - RNA, 22 nt, synthetic construct
  source 1..22: mol_type = other RNA
attcagaaagctttgaatgaac

SEQ ID NO: 15085 - RNA, 22 nt, synthetic construct
  source 1..22: mol_type = other RNA
attgcatatctatctcctttag

SEQ ID NO: 15086 - RNA, 22 nt, synthetic construct
  source 1..22: mol_type = other RNA
attgccttttaaatttgcctca

SEQ ID NO: 15087 - RNA, 22 nt, synthetic construct
  source 1..22: mol_type = other RNA
atttaccatttaggttgttttc

SEQ ID NO: 15088 - RNA, 22 nt, synthetic construct
  source 1..22: mol_type = other RNA
atttaggttgttttctccacac

SEQ ID NO: 15089 - RNA, 22 nt, synthetic construct
  source 1..22: mol_type = other RNA
atttgcctcagttcattcaaag

SEQ ID NO: 15090 - RNA, 22 nt, synthetic construct
  source 1..22: mol_type = other RNA
attttatagagtataaccttcc

SEQ ID NO: 15091 - RNA, 22 nt, synthetic construct
  source 1..22: mol_type = other RNA
attttgagacttccaagataat

SEQ ID NO: 15092 - RNA, 22 nt, synthetic construct
  source 1..22: mol_type = other RNA
attttgctcttggtttgttata

SEQ ID NO: 15093 - RNA, 22 nt, synthetic construct
  source 1..22: mol_type = other RNA
attttggttgattttatagagt

SEQ ID NO: 15094 - RNA, 22 nt, synthetic construct
  source 1..22: mol_type = other RNA
caaaatctaagccagagaggag

SEQ ID NO: 15095 - RNA, 22 nt, synthetic construct
  source 1..22: mol_type = other RNA
caaaatggaaggttatactcta

SEQ ID NO: 15096 - RNA, 22 nt, synthetic construct
  source 1..22: mol_type = other RNA
caaaatgttgatccatccaaca

SEQ ID NO: 15097 - RNA, 22 nt, synthetic construct
  source 1..22: mol_type = other RNA
caaaccaagagcaaaatctaag

SEQ ID NO: 15098 - RNA, 22 nt, synthetic construct
  source 1..22: mol_type = other RNA
caaagctttctgaatctgttgg

SEQ ID NO: 15099 - RNA, 22 nt, synthetic construct
  source 1..22: mol_type = other RNA
caacagattcagaaagctttga

SEQ ID NO: 15100 - RNA, 22 nt, synthetic construct
  source 1..22: mol_type = other RNA
caacattttggttgattttata

SEQ ID NO: 15101 - RNA, 22 nt, synthetic construct
  source 1..22: mol_type = other RNA
caaccaaaatgttgatccatcc

SEQ ID NO: 15102 - RNA, 22 nt, synthetic construct
  source 1..22: mol_type = other RNA
caacctaaatggtaaatataac

SEQ ID NO: 15103 - RNA, 22 nt, synthetic construct
  source 1..22: mol_type = other RNA
caagagcaaaatctaagccaga

SEQ ID NO: 15104 - RNA, 22 nt, synthetic construct
  source 1..22: mol_type = other RNA
caagataatcctcttctcctct

SEQ ID NO: 15105 - RNA, 22 nt, synthetic construct
  source 1..22: mol_type = other RNA
cacactcatcatgccaccacca

SEQ ID NO: 15106 - RNA, 22 nt, synthetic construct
  source 1..22: mol_type = other RNA
caccaccagcctcctaaaggag

SEQ ID NO: 15107 - RNA, 22 nt, synthetic construct
  source 1..22: mol_type = other RNA
caccagcctcctaaaggagata

SEQ ID NO: 15108 - RNA, 22 nt, synthetic construct
  source 1..22: mol_type = other RNA
cactcatcatgccaccaccagc

SEQ ID NO: 15109 - RNA, 22 nt, synthetic construct
  source 1..22: mol_type = other RNA
cagaaagctttgaatgaactga

SEQ ID NO: 15110 - RNA, 22 nt, synthetic construct
  source 1..22: mol_type = other RNA
cagagaggagaagaggattatc

SEQ ID NO: 15111 - RNA, 22 nt, synthetic construct
  source 1..22: mol_type = other RNA
cagattcagaaagctttgaatg

SEQ ID NO: 15112 - RNA, 22 nt, synthetic construct
  source 1..22: mol_type = other RNA
cagcctcctaaaggagatagat

SEQ ID NO: 15113 - RNA, 22 nt, synthetic construct
  source 1..22: mol_type = other RNA
cagttcattcaaagctttctga

SEQ ID NO: 15114 - RNA, 22 nt, synthetic construct
  source 1..22: mol_type = other RNA
catatctatctcctttaggagg

SEQ ID NO: 15115 - RNA, 22 nt, synthetic construct
  source 1..22: mol_type = other RNA
catcatgccaccaccagcctcc

SEQ ID NO: 15116 - RNA, 22 nt, synthetic construct
  source 1..22: mol_type = other RNA
catccaacagattcagaaagct

SEQ ID NO: 15117 - RNA, 22 nt, synthetic construct
  source 1..22: mol_type = other RNA
catgatgagtgtggagaaaaca

SEQ ID NO: 15118 - RNA, 22 nt, synthetic construct
  source 1..22: mol_type = other RNA
catgccaccaccagcctcctaa

SEQ ID NO: 15119 - RNA, 22 nt, synthetic construct
  source 1..22: mol_type = other RNA
cattaaattgcatatctatctc

SEQ ID NO: 15120 - RNA, 22 nt, synthetic construct
  source 1..22: mol_type = other RNA
cattcaaagctttctgaatctg

SEQ ID NO: 15121 - RNA, 22 nt, synthetic construct
  source 1..22: mol_type = other RNA
catttaggttgttttctccaca

SEQ ID NO: 15122 - RNA, 22 nt, synthetic construct
  source 1..22: mol_type = other RNA
cattttgagacttccaagataa

SEQ ID NO: 15123 - RNA, 22 nt, synthetic construct
  source 1..22: mol_type = other RNA
cattttggttgattttatagag

SEQ ID NO: 15124 - RNA, 22 nt, synthetic construct
  source 1..22: mol_type = other RNA
ccaaaatgttgatccatccaac

SEQ ID NO: 15125 - RNA, 22 nt, synthetic construct
  source 1..22: mol_type = other RNA
ccaacagattcagaaagctttg

SEQ ID NO: 15126 - RNA, 22 nt, synthetic construct
  source 1..22: mol_type = other RNA
ccaagagcaaaatctaagccag

SEQ ID NO: 15127 - RNA, 22 nt, synthetic construct
  source 1..22: mol_type = other RNA
ccaagataatcctcttctcctc

SEQ ID NO: 15128 - RNA, 22 nt, synthetic construct
  source 1..22: mol_type = other RNA
ccacactcatcatgccaccacc

SEQ ID NO: 15129 - RNA, 22 nt, synthetic construct
  source 1..22: mol_type = other RNA
ccaccaccagcctcctaaagga

SEQ ID NO: 15130 - RNA, 22 nt, synthetic construct
  source 1..22: mol_type = other RNA
ccaccagcctcctaaaggagat

SEQ ID NO: 15131 - RNA, 22 nt, synthetic construct
  source 1..22: mol_type = other RNA
ccagagaggagaagaggattat

SEQ ID NO: 15132 - RNA, 22 nt, synthetic construct
  source 1..22: mol_type = other RNA
ccagcctcctaaaggagataga

SEQ ID NO: 15133 - RNA, 22 nt, synthetic construct
  source 1..22: mol_type = other RNA
ccatccaacagattcagaaagc

SEQ ID NO: 15134 - RNA, 22 nt, synthetic construct
  source 1..22: mol_type = other RNA
ccattaaattgcatatctatct

SEQ ID NO: 15135 - RNA, 22 nt, synthetic construct
  source 1..22: mol_type = other RNA
ccatttaggttgttttctccac

SEQ ID NO: 15136 - RNA, 22 nt, synthetic construct
  source 1..22: mol_type = other RNA
ccattttgagacttccaagata

SEQ ID NO: 15137 - RNA, 22 nt, synthetic construct
  source 1..22: mol_type = other RNA
cccattaaattgcatatctatc

SEQ ID NO: 15138 - RNA, 22 nt, synthetic construct
  source 1..22: mol_type = other RNA
cctaaaggagatagatatgcaa

SEQ ID NO: 15139 - RNA, 22 nt, synthetic construct
  source 1..22: mol_type = other RNA
cctaaatggtaaatataacaaa

SEQ ID NO: 15140 - RNA, 22 nt, synthetic construct
  source 1..22: mol_type = other RNA
cctcagttcattcaaagctttc

SEQ ID NO: 15141 - RNA, 22 nt, synthetic construct
  source 1..22: mol_type = other RNA
cctcctaaaggagatagatatg

SEQ ID NO: 15142 - RNA, 22 nt, synthetic construct
  source 1..22: mol_type = other RNA
cctctatttggtttccttaaaa

SEQ ID NO: 15143 - RNA, 22 nt, synthetic construct
  source 1..22: mol_type = other RNA
cctctctggcttagattttgct

SEQ ID NO: 15144 - RNA, 22 nt, synthetic construct
  source 1..22: mol_type = other RNA
cctcttctcctctctggcttag

SEQ ID NO: 15145 - RNA, 22 nt, synthetic construct
  source 1..22: mol_type = other RNA
ccttccattttgagacttccaa

SEQ ID NO: 15146 - RNA, 22 nt, synthetic construct
  source 1..22: mol_type = other RNA
cctttaggaggctggtggtggc

SEQ ID NO: 15147 - RNA, 22 nt, synthetic construct
  source 1..22: mol_type = other RNA
ccttttaaatttgcctcagttc

SEQ ID NO: 15148 - RNA, 22 nt, synthetic construct
  source 1..22: mol_type = other RNA
ctaaaggagatagatatgcaat

SEQ ID NO: 15149 - RNA, 22 nt, synthetic construct
  source 1..22: mol_type = other RNA
ctaaatggtaaatataacaaac

SEQ ID NO: 15150 - RNA, 22 nt, synthetic construct
  source 1..22: mol_type = other RNA
ctaagccagagaggagaagagg

SEQ ID NO: 15151 - RNA, 22 nt, synthetic construct
  source 1..22: mol_type = other RNA
ctataaaatcaaccaaaatgtt

SEQ ID NO: 15152 - RNA, 22 nt, synthetic construct
  source 1..22: mol_type = other RNA
ctatctcctttaggaggctggt

SEQ ID NO: 15153 - RNA, 22 nt, synthetic construct
  source 1..22: mol_type = other RNA
ctcaaaatggaaggttatactc

SEQ ID NO: 15154 - RNA, 22 nt, synthetic construct
  source 1..22: mol_type = other RNA
ctcagttcattcaaagctttct

SEQ ID NO: 15155 - RNA, 22 nt, synthetic construct
  source 1..22: mol_type = other RNA
ctcatcatgccaccaccagcct

SEQ ID NO: 15156 - RNA, 22 nt, synthetic construct
  source 1..22: mol_type = other RNA
ctccacactcatcatgccacca

SEQ ID NO: 15157 - RNA, 22 nt, synthetic construct
  source 1..22: mol_type = other RNA
ctcctaaaggagatagatatgc

SEQ ID NO: 15158 - RNA, 22 nt, synthetic construct
  source 1..22: mol_type = other RNA
ctcctctctggcttagattttg

SEQ ID NO: 15159 - RNA, 22 nt, synthetic construct
  source 1..22: mol_type = other RNA
ctcctttaggaggctggtggtg

SEQ ID NO: 15160 - RNA, 22 nt, synthetic construct
  source 1..22: mol_type = other RNA
ctctataaaatcaaccaaaatg

SEQ ID NO: 15161 - RNA, 22 nt, synthetic construct
  source 1..22: mol_type = other RNA
ctctatttggtttccttaaaaa

SEQ ID NO: 15162 - RNA, 22 nt, synthetic construct
  source 1..22: mol_type = other RNA
ctctctggcttagattttgctc

SEQ ID NO: 15163 - RNA, 22 nt, synthetic construct
  source 1..22: mol_type = other RNA
ctctggcttagattttgctctt

SEQ ID NO: 15164 - RNA, 22 nt, synthetic construct
  source 1..22: mol_type = other RNA
ctcttctcctctctggcttaga

SEQ ID NO: 15165 - RNA, 22 nt, synthetic construct
  source 1..22: mol_type = other RNA
ctcttggtttgttatatttacc

SEQ ID NO: 15166 - RNA, 22 nt, synthetic construct
  source 1..22: mol_type = other RNA
ctgaatctgttggatggatcaa

SEQ ID NO: 15167 - RNA, 22 nt, synthetic construct
  source 1..22: mol_type = other RNA
ctggcttagattttgctcttgg

SEQ ID NO: 15168 - RNA, 22 nt, synthetic construct
  source 1..22: mol_type = other RNA
ctggtggtggcatgatgagtgt

SEQ ID NO: 15169 - RNA, 22 nt, synthetic construct
  source 1..22: mol_type = other RNA
ctgttggatggatcaacatttt

SEQ ID NO: 15170 - RNA, 22 nt, synthetic construct
  source 1..22: mol_type = other RNA
cttagattttgctcttggtttg

SEQ ID NO: 15171 - RNA, 22 nt, synthetic construct
  source 1..22: mol_type = other RNA
cttccaagataatcctcttctc

SEQ ID NO: 15172 - RNA, 22 nt, synthetic construct
  source 1..22: mol_type = other RNA
cttccattttgagacttccaag

SEQ ID NO: 15173 - RNA, 22 nt, synthetic construct
  source 1..22: mol_type = other RNA
cttcctctatttggtttcctta

SEQ ID NO: 15174 - RNA, 22 nt, synthetic construct
  source 1..22: mol_type = other RNA
cttctcctctctggcttagatt

SEQ ID NO: 15175 - RNA, 22 nt, synthetic construct
  source 1..22: mol_type = other RNA
cttggaagtctcaaaatggaag

SEQ ID NO: 15176 - RNA, 22 nt, synthetic construct
  source 1..22: mol_type = other RNA
cttggtttgttatatttaccat

SEQ ID NO: 15177 - RNA, 22 nt, synthetic construct
  source 1..22: mol_type = other RNA
ctttaggaggctggtggtggca

SEQ ID NO: 15178 - RNA, 22 nt, synthetic construct
  source 1..22: mol_type = other RNA
ctttctgaatctgttggatgga

SEQ ID NO: 15179 - RNA, 22 nt, synthetic construct
  source 1..22: mol_type = other RNA
ctttgaatgaactgaggcaaat

SEQ ID NO: 15180 - RNA, 22 nt, synthetic construct
  source 1..22: mol_type = other RNA
cttttaaatttgcctcagttca

SEQ ID NO: 15181 - RNA, 22 nt, synthetic construct
  source 1..22: mol_type = other RNA
gaaaacaacctaaatggtaaat

SEQ ID NO: 15182 - RNA, 22 nt, synthetic construct
  source 1..22: mol_type = other RNA
gaaagctttgaatgaactgagg

SEQ ID NO: 15183 - RNA, 22 nt, synthetic construct
  source 1..22: mol_type = other RNA
gaactgaggcaaatttaaaagg

SEQ ID NO: 15184 - RNA, 22 nt, synthetic construct
  source 1..22: mol_type = other RNA
gaagaggattatcttggaagtc

SEQ ID NO: 15185 - RNA, 22 nt, synthetic construct
  source 1..22: mol_type = other RNA
gaaggttatactctataaaatc

SEQ ID NO: 15186 - RNA, 22 nt, synthetic construct
  source 1..22: mol_type = other RNA
gaagtctcaaaatggaaggtta

SEQ ID NO: 15187 - RNA, 22 nt, synthetic construct
  source 1..22: mol_type = other RNA
gaatctgttggatggatcaaca

SEQ ID NO: 15188 - RNA, 22 nt, synthetic construct
  source 1..22: mol_type = other RNA
gaatgaactgaggcaaatttaa

SEQ ID NO: 15189 - RNA, 22 nt, synthetic construct
  source 1..22: mol_type = other RNA
gacttccaagataatcctcttc

SEQ ID NO: 15190 - RNA, 22 nt, synthetic construct
  source 1..22: mol_type = other RNA
gagaaaacaacctaaatggtaa

SEQ ID NO: 15191 - RNA, 22 nt, synthetic construct
  source 1..22: mol_type = other RNA
gagaagaggattatcttggaag

SEQ ID NO: 15192 - RNA, 22 nt, synthetic construct
  source 1..22: mol_type = other RNA
gagacttccaagataatcctct

SEQ ID NO: 15193 - RNA, 22 nt, synthetic construct
  source 1..22: mol_type = other RNA
gagaggagaagaggattatctt

SEQ ID NO: 15194 - RNA, 22 nt, synthetic construct
  source 1..22: mol_type = other RNA
gagcaaaatctaagccagagag

SEQ ID NO: 15195 - RNA, 22 nt, synthetic construct
  source 1..22: mol_type = other RNA
gaggagaagaggattatcttgg

SEQ ID NO: 15196 - RNA, 22 nt, synthetic construct
  source 1..22: mol_type = other RNA
gaggattatcttggaagtctca

SEQ ID NO: 15197 - RNA, 22 nt, synthetic construct
  source 1..22: mol_type = other RNA
gaggctggtggtggcatgatga

SEQ ID NO: 15198 - RNA, 22 nt, synthetic construct
  source 1..22: mol_type = other RNA
gagtataaccttccattttgag

SEQ ID NO: 15199 - RNA, 22 nt, synthetic construct
  source 1..22: mol_type = other RNA
gagtgtggagaaaacaacctaa

SEQ ID NO: 15200 - RNA, 22 nt, synthetic construct
  source 1..22: mol_type = other RNA
gagttgcttcctctatttggtt

SEQ ID NO: 15201 - RNA, 22 nt, synthetic construct
  source 1..22: mol_type = other RNA
gataatcctcttctcctctctg

SEQ ID NO: 15202 - RNA, 22 nt, synthetic construct
  source 1..22: mol_type = other RNA
gatcaacattttggttgatttt

SEQ ID NO: 15203 - RNA, 22 nt, synthetic construct
  source 1..22: mol_type = other RNA
gatccatccaacagattcagaa

SEQ ID NO: 15204 - RNA, 22 nt, synthetic construct
  source 1..22: mol_type = other RNA
gatgagtgtggagaaaacaacc

SEQ ID NO: 15205 - RNA, 22 nt, synthetic construct
  source 1..22: mol_type = other RNA
gatggatcaacattttggttga

SEQ ID NO: 15206 - RNA, 22 nt, synthetic construct
  source 1..22: mol_type = other RNA
gattatcttggaagtctcaaaa

SEQ ID NO: 15207 - RNA, 22 nt, synthetic construct
  source 1..22: mol_type = other RNA
gattcagaaagctttgaatgaa

SEQ ID NO: 15208 - RNA, 22 nt, synthetic construct
  source 1..22: mol_type = other RNA
gattttatagagtataaccttc

SEQ ID NO: 15209 - RNA, 22 nt, synthetic construct
  source 1..22: mol_type = other RNA
gattttgctcttggtttgttat

SEQ ID NO: 15210 - RNA, 22 nt, synthetic construct
  source 1..22: mol_type = other RNA
gcaaaatctaagccagagagga

SEQ ID NO: 15211 - RNA, 22 nt, synthetic construct
  source 1..22: mol_type = other RNA
gcatatctatctcctttaggag

SEQ ID NO: 15212 - RNA, 22 nt, synthetic construct
  source 1..22: mol_type = other RNA
gcatgatgagtgtggagaaaac

SEQ ID NO: 15213 - RNA, 22 nt, synthetic construct
  source 1..22: mol_type = other RNA
gccaccaccagcctcctaaagg

SEQ ID NO: 15214 - RNA, 22 nt, synthetic construct
  source 1..22: mol_type = other RNA
gccagagaggagaagaggatta

SEQ ID NO: 15215 - RNA, 22 nt, synthetic construct
  source 1..22: mol_type = other RNA
gcctcagttcattcaaagcttt

SEQ ID NO: 15216 - RNA, 22 nt, synthetic construct
  source 1..22: mol_type = other RNA
gcctcctaaaggagatagatat

SEQ ID NO: 15217 - RNA, 22 nt, synthetic construct
  source 1..22: mol_type = other RNA
gccttttaaatttgcctcagtt

SEQ ID NO: 15218 - RNA, 22 nt, synthetic construct
  source 1..22: mol_type = other RNA
gctcttggtttgttatatttac

SEQ ID NO: 15219 - RNA, 22 nt, synthetic construct
  source 1..22: mol_type = other RNA
gctggtggtggcatgatgagtg

SEQ ID NO: 15220 - RNA, 22 nt, synthetic construct
  source 1..22: mol_type = other RNA
gcttagattttgctcttggttt

SEQ ID NO: 15221 - RNA, 22 nt, synthetic construct
  source 1..22: mol_type = other RNA
gcttcctctatttggtttcctt

SEQ ID NO: 15222 - RNA, 22 nt, synthetic construct
  source 1..22: mol_type = other RNA
gctttctgaatctgttggatgg

SEQ ID NO: 15223 - RNA, 22 nt, synthetic construct
  source 1..22: mol_type = other RNA
gctttgaatgaactgaggcaaa

SEQ ID NO: 15224 - RNA, 22 nt, synthetic construct
  source 1..22: mol_type = other RNA
ggaaggttatactctataaaat

SEQ ID NO: 15225 - RNA, 22 nt, synthetic construct
  source 1..22: mol_type = other RNA
ggaagtctcaaaatggaaggtt

SEQ ID NO: 15226 - RNA, 22 nt, synthetic construct
  source 1..22: mol_type = other RNA
ggagaaaacaacctaaatggta

SEQ ID NO: 15227 - RNA, 22 nt, synthetic construct
  source 1..22: mol_type = other RNA
ggagaagaggattatcttggaa

SEQ ID NO: 15228 - RNA, 22 nt, synthetic construct
  source 1..22: mol_type = other RNA
ggaggctggtggtggcatgatg

SEQ ID NO: 15229 - RNA, 22 nt, synthetic construct
  source 1..22: mol_type = other RNA
ggatcaacattttggttgattt

SEQ ID NO: 15230 - RNA, 22 nt, synthetic construct
  source 1..22: mol_type = other RNA
ggatggatcaacattttggttg

SEQ ID NO: 15231 - RNA, 22 nt, synthetic construct
  source 1..22: mol_type = other RNA
ggattatcttggaagtctcaaa

SEQ ID NO: 15232 - RNA, 22 nt, synthetic construct
  source 1..22: mol_type = other RNA
ggcatgatgagtgtggagaaaa

SEQ ID NO: 15233 - RNA, 22 nt, synthetic construct
  source 1..22: mol_type = other RNA
ggctggtggtggcatgatgagt

SEQ ID NO: 15234 - RNA, 22 nt, synthetic construct
  source 1..22: mol_type = other RNA
ggcttagattttgctcttggtt

SEQ ID NO: 15235 - RNA, 22 nt, synthetic construct
  source 1..22: mol_type = other RNA
ggtaaatataacaaaccaagag

SEQ ID NO: 15236 - RNA, 22 nt, synthetic construct
  source 1..22: mol_type = other RNA
ggtggcatgatgagtgtggaga

SEQ ID NO: 15237 - RNA, 22 nt, synthetic construct
  source 1..22: mol_type = other RNA
ggtggtggcatgatgagtgtgg

SEQ ID NO: 15238 - RNA, 22 nt, synthetic construct
  source 1..22: mol_type = other RNA
ggttatactctataaaatcaac

SEQ ID NO: 15239 - RNA, 22 nt, synthetic construct
  source 1..22: mol_type = other RNA
ggttgattttatagagtataac

SEQ ID NO: 15240 - RNA, 22 nt, synthetic construct
  source 1..22: mol_type = other RNA
ggttgttttctccacactcatc

SEQ ID NO: 15241 - RNA, 22 nt, synthetic construct
  source 1..22: mol_type = other RNA
ggtttgttatatttaccattta

SEQ ID NO: 15242 - RNA, 22 nt, synthetic construct
  source 1..22: mol_type = other RNA
gtaaatataacaaaccaagagc

SEQ ID NO: 15243 - RNA, 22 nt, synthetic construct
  source 1..22: mol_type = other RNA
gtataaccttccattttgagac

SEQ ID NO: 15244 - RNA, 22 nt, synthetic construct
  source 1..22: mol_type = other RNA
gtctcaaaatggaaggttatac

SEQ ID NO: 15245 - RNA, 22 nt, synthetic construct
  source 1..22: mol_type = other RNA
gtggagaaaacaacctaaatgg

SEQ ID NO: 15246 - RNA, 22 nt, synthetic construct
  source 1..22: mol_type = other RNA
gtggcatgatgagtgtggagaa

SEQ ID NO: 15247 - RNA, 22 nt, synthetic construct
  source 1..22: mol_type = other RNA
gtggtggcatgatgagtgtgga

SEQ ID NO: 15248 - RNA, 22 nt, synthetic construct
  source 1..22: mol_type = other RNA
gtgtggagaaaacaacctaaat

SEQ ID NO: 15249 - RNA, 22 nt, synthetic construct
  source 1..22: mol_type = other RNA
gttatactctataaaatcaacc

SEQ ID NO: 15250 - RNA, 22 nt, synthetic construct
  source 1..22: mol_type = other RNA
gttatatttaccatttaggttg

SEQ ID NO: 15251 - RNA, 22 nt, synthetic construct
  source 1..22: mol_type = other RNA
gttcattcaaagctttctgaat

SEQ ID NO: 15252 - RNA, 22 nt, synthetic construct
  source 1..22: mol_type = other RNA
gttgatccatccaacagattca

SEQ ID NO: 15253 - RNA, 22 nt, synthetic construct
  source 1..22: mol_type = other RNA
gttgattttatagagtataacc

SEQ ID NO: 15254 - RNA, 22 nt, synthetic construct
  source 1..22: mol_type = other RNA
gttgcttcctctatttggtttc

SEQ ID NO: 15255 - RNA, 22 nt, synthetic construct
  source 1..22: mol_type = other RNA
gttggatggatcaacattttgg

SEQ ID NO: 15256 - RNA, 22 nt, synthetic construct
  source 1..22: mol_type = other RNA
gttgttttctccacactcatca

SEQ ID NO: 15257 - RNA, 22 nt, synthetic construct
  source 1..22: mol_type = other RNA
gtttgttatatttaccatttag

SEQ ID NO: 15258 - RNA, 22 nt, synthetic construct
  source 1..22: mol_type = other RNA
gttttctccacactcatcatgc

SEQ ID NO: 15259 - RNA, 22 nt, synthetic construct
  source 1..22: mol_type = other RNA
taaaatcaaccaaaatgttgat

SEQ ID NO: 15260 - RNA, 22 nt, synthetic construct
  source 1..22: mol_type = other RNA
taaaggagatagatatgcaatt

SEQ ID NO: 15261 - RNA, 22 nt, synthetic construct
  source 1..22: mol_type = other RNA
taaatataacaaaccaagagca

SEQ ID NO: 15262 - RNA, 22 nt, synthetic construct
  source 1..22: mol_type = other RNA
taaatggtaaatataacaaacc

SEQ ID NO: 15263 - RNA, 22 nt, synthetic construct
  source 1..22: mol_type = other RNA
taaattgcatatctatctcctt

SEQ ID NO: 15264 - RNA, 22 nt, synthetic construct
  source 1..22: mol_type = other RNA
taaatttgcctcagttcattca

SEQ ID NO: 15265 - RNA, 22 nt, synthetic construct
  source 1..22: mol_type = other RNA
taacaaaccaagagcaaaatct

SEQ ID NO: 15266 - RNA, 22 nt, synthetic construct
  source 1..22: mol_type = other RNA
taaccttccattttgagacttc

SEQ ID NO: 15267 - RNA, 22 nt, synthetic construct
  source 1..22: mol_type = other RNA
taagccagagaggagaagagga

SEQ ID NO: 15268 - RNA, 22 nt, synthetic construct
  source 1..22: mol_type = other RNA
taaggaaaccaaatagaggaag

SEQ ID NO: 15269 - RNA, 22 nt, synthetic construct
  source 1..22: mol_type = other RNA
taatcctcttctcctctctggc

SEQ ID NO: 15270 - RNA, 22 nt, synthetic construct
  source 1..22: mol_type = other RNA
taccatttaggttgttttctcc

SEQ ID NO: 15271 - RNA, 22 nt, synthetic construct
  source 1..22: mol_type = other RNA
tactctataaaatcaaccaaaa

SEQ ID NO: 15272 - RNA, 22 nt, synthetic construct
  source 1..22: mol_type = other RNA
tagagtataaccttccattttg

SEQ ID NO: 15273 - RNA, 22 nt, synthetic construct
  source 1..22: mol_type = other RNA
tagattttgctcttggtttgtt

SEQ ID NO: 15274 - RNA, 22 nt, synthetic construct
  source 1..22: mol_type = other RNA
taggaggctggtggtggcatga

SEQ ID NO: 15275 - RNA, 22 nt, synthetic construct
  source 1..22: mol_type = other RNA
taggttgttttctccacactca

SEQ ID NO: 15276 - RNA, 22 nt, synthetic construct
  source 1..22: mol_type = other RNA
tataaaatcaaccaaaatgttg

SEQ ID NO: 15277 - RNA, 22 nt, synthetic construct
  source 1..22: mol_type = other RNA
tataacaaaccaagagcaaaat

SEQ ID NO: 15278 - RNA, 22 nt, synthetic construct
  source 1..22: mol_type = other RNA
tataaccttccattttgagact

SEQ ID NO: 15279 - RNA, 22 nt, synthetic construct
  source 1..22: mol_type = other RNA
tatactctataaaatcaaccaa

SEQ ID NO: 15280 - RNA, 22 nt, synthetic construct
  source 1..22: mol_type = other RNA
tatagagtataaccttccattt

SEQ ID NO: 15281 - RNA, 22 nt, synthetic construct
  source 1..22: mol_type = other RNA
tatatttaccatttaggttgtt

SEQ ID NO: 15282 - RNA, 22 nt, synthetic construct
  source 1..22: mol_type = other RNA
tatctatctcctttaggaggct

SEQ ID NO: 15283 - RNA, 22 nt, synthetic construct
  source 1..22: mol_type = other RNA
tatctcctttaggaggctggtg

SEQ ID NO: 15284 - RNA, 22 nt, synthetic construct
  source 1..22: mol_type = other RNA
tatcttggaagtctcaaaatgg

SEQ ID NO: 15285 - RNA, 22 nt, synthetic construct
  source 1..22: mol_type = other RNA
tatgagttgcttcctctatttg

SEQ ID NO: 15286 - RNA, 22 nt, synthetic construct
  source 1..22: mol_type = other RNA
tattgccttttaaatttgcctc

SEQ ID NO: 15287 - RNA, 22 nt, synthetic construct
  source 1..22: mol_type = other RNA
tatttaccatttaggttgtttt

SEQ ID NO: 15288 - RNA, 22 nt, synthetic construct
  source 1..22: mol_type = other RNA
tcaaaatggaaggttatactct

SEQ ID NO: 15289 - RNA, 22 nt, synthetic construct
  source 1..22: mol_type = other RNA
tcaaagctttctgaatctgttg

SEQ ID NO: 15290 - RNA, 22 nt, synthetic construct
  source 1..22: mol_type = other RNA
tcaacattttggttgattttat

SEQ ID NO: 15291 - RNA, 22 nt, synthetic construct
  source 1..22: mol_type = other RNA
tcaaccaaaatgttgatccatc

SEQ ID NO: 15292 - RNA, 22 nt, synthetic construct
  source 1..22: mol_type = other RNA
tcagaaagctttgaatgaactg

SEQ ID NO: 15293 - RNA, 22 nt, synthetic construct
  source 1..22: mol_type = other RNA
tcagttcattcaaagctttctg

SEQ ID NO: 15294 - RNA, 22 nt, synthetic construct
  source 1..22: mol_type = other RNA
tcatcatgccaccaccagcctc

SEQ ID NO: 15295 - RNA, 22 nt, synthetic construct
  source 1..22: mol_type = other RNA
tcatgccaccaccagcctccta

SEQ ID NO: 15296 - RNA, 22 nt, synthetic construct
  source 1..22: mol_type = other RNA
tcattcaaagctttctgaatct

SEQ ID NO: 15297 - RNA, 22 nt, synthetic construct
  source 1..22: mol_type = other RNA
tccaacagattcagaaagcttt

SEQ ID NO: 15298 - RNA, 22 nt, synthetic construct
  source 1..22: mol_type = other RNA
tccaagataatcctcttctcct

SEQ ID NO: 15299 - RNA, 22 nt, synthetic construct
  source 1..22: mol_type = other RNA
tccacactcatcatgccaccac

SEQ ID NO: 15300 - RNA, 22 nt, synthetic construct
  source 1..22: mol_type = other RNA
tccatccaacagattcagaaag

SEQ ID NO: 15301 - RNA, 22 nt, synthetic construct
  source 1..22: mol_type = other RNA
tccattttgagacttccaagat

SEQ ID NO: 15302 - RNA, 22 nt, synthetic construct
  source 1..22: mol_type = other RNA
tcctaaaggagatagatatgca

SEQ ID NO: 15303 - RNA, 22 nt, synthetic construct
  source 1..22: mol_type = other RNA
tcctctatttggtttccttaaa

SEQ ID NO: 15304 - RNA, 22 nt, synthetic construct
  source 1..22: mol_type = other RNA
tcctctctggcttagattttgc

SEQ ID NO: 15305 - RNA, 22 nt, synthetic construct
  source 1..22: mol_type = other RNA
tcctcttctcctctctggctta

SEQ ID NO: 15306 - RNA, 22 nt, synthetic construct
  source 1..22: mol_type = other RNA
tcctttaggaggctggtggtgg

SEQ ID NO: 15307 - RNA, 22 nt, synthetic construct
  source 1..22: mol_type = other RNA
tctaagccagagaggagaagag

SEQ ID NO: 15308 - RNA, 22 nt, synthetic construct
  source 1..22: mol_type = other RNA
tctataaaatcaaccaaaatgt

SEQ ID NO: 15309 - RNA, 22 nt, synthetic construct
  source 1..22: mol_type = other RNA
tctatctcctttaggaggctgg

SEQ ID NO: 15310 - RNA, 22 nt, synthetic construct
  source 1..22: mol_type = other RNA
tctatttggtttccttaaaaaa

SEQ ID NO: 15311 - RNA, 22 nt, synthetic construct
  source 1..22: mol_type = other RNA
tctcaaaatggaaggttatact

SEQ ID NO: 15312 - RNA, 22 nt, synthetic construct
  source 1..22: mol_type = other RNA
tctccacactcatcatgccacc

SEQ ID NO: 15313 - RNA, 22 nt, synthetic construct
  source 1..22: mol_type = other RNA
tctcctctctggcttagatttt

SEQ ID NO: 15314 - RNA, 22 nt, synthetic construct
  source 1..22: mol_type = other RNA
tctcctttaggaggctggtggt

SEQ ID NO: 15315 - RNA, 22 nt, synthetic construct
  source 1..22: mol_type = other RNA
tctctggcttagattttgctct

SEQ ID NO: 15316 - RNA, 22 nt, synthetic construct
  source 1..22: mol_type = other RNA
tctgaatctgttggatggatca

SEQ ID NO: 15317 - RNA, 22 nt, synthetic construct
  source 1..22: mol_type = other RNA
tctggcttagattttgctcttg

SEQ ID NO: 15318 - RNA, 22 nt, synthetic construct
  source 1..22: mol_type = other RNA
tctgttggatggatcaacattt

SEQ ID NO: 15319 - RNA, 22 nt, synthetic construct
  source 1..22: mol_type = other RNA
tcttctcctctctggcttagat

SEQ ID NO: 15320 - RNA, 22 nt, synthetic construct
  source 1..22: mol_type = other RNA
tcttggaagtctcaaaatggaa

SEQ ID NO: 15321 - RNA, 22 nt, synthetic construct
  source 1..22: mol_type = other RNA
tcttggtttgttatatttacca

SEQ ID NO: 15322 - RNA, 22 nt, synthetic construct
  source 1..22: mol_type = other RNA
tgaactgaggcaaatttaaaag

SEQ ID NO: 15323 - RNA, 22 nt, synthetic construct
  source 1..22: mol_type = other RNA
tgaatctgttggatggatcaac

SEQ ID NO: 15324 - RNA, 22 nt, synthetic construct
  source 1..22: mol_type = other RNA
tgaatgaactgaggcaaattta

SEQ ID NO: 15325 - RNA, 22 nt, synthetic construct
  source 1..22: mol_type = other RNA
tgagacttccaagataatcctc

SEQ ID NO: 15326 - RNA, 22 nt, synthetic construct
  source 1..22: mol_type = other RNA
tgagtgtggagaaaacaaccta

SEQ ID NO: 15327 - RNA, 22 nt, synthetic construct
  source 1..22: mol_type = other RNA
tgagttgcttcctctatttggt

SEQ ID NO: 15328 - RNA, 22 nt, synthetic construct
  source 1..22: mol_type = other RNA
tgatccatccaacagattcaga

SEQ ID NO: 15329 - RNA, 22 nt, synthetic construct
  source 1..22: mol_type = other RNA
tgatgagtgtggagaaaacaac

SEQ ID NO: 15330 - RNA, 22 nt, synthetic construct
  source 1..22: mol_type = other RNA
tgattttatagagtataacctt

SEQ ID NO: 15331 - RNA, 22 nt, synthetic construct
  source 1..22: mol_type = other RNA
tgcatatctatctcctttagga

SEQ ID NO: 15332 - RNA, 22 nt, synthetic construct
  source 1..22: mol_type = other RNA
tgccaccaccagcctcctaaag

SEQ ID NO: 15333 - RNA, 22 nt, synthetic construct
  source 1..22: mol_type = other RNA
tgcctcagttcattcaaagctt

SEQ ID NO: 15334 - RNA, 22 nt, synthetic construct
  source 1..22: mol_type = other RNA
tgccttttaaatttgcctcagt

SEQ ID NO: 15335 - RNA, 22 nt, synthetic construct
  source 1..22: mol_type = other RNA
tgctcttggtttgttatattta

SEQ ID NO: 15336 - RNA, 22 nt, synthetic construct
  source 1..22: mol_type = other RNA
tgcttcctctatttggtttcct

SEQ ID NO: 15337 - RNA, 22 nt, synthetic construct
  source 1..22: mol_type = other RNA
tggaaggttatactctataaaa

SEQ ID NO: 15338 - RNA, 22 nt, synthetic construct
  source 1..22: mol_type = other RNA
tggaagtctcaaaatggaaggt

SEQ ID NO: 15339 - RNA, 22 nt, synthetic construct
  source 1..22: mol_type = other RNA
tggagaaaacaacctaaatggt

SEQ ID NO: 15340 - RNA, 22 nt, synthetic construct
  source 1..22: mol_type = other RNA
tggatcaacattttggttgatt

SEQ ID NO: 15341 - RNA, 22 nt, synthetic construct
  source 1..22: mol_type = other RNA
tggatggatcaacattttggtt

SEQ ID NO: 15342 - RNA, 22 nt, synthetic construct
  source 1..22: mol_type = other RNA
tggcatgatgagtgtggagaaa

SEQ ID NO: 15343 - RNA, 22 nt, synthetic construct
  source 1..22: mol_type = other RNA
tggcttagattttgctcttggt

SEQ ID NO: 15344 - RNA, 22 nt, synthetic construct
  source 1..22: mol_type = other RNA
tggtaaatataacaaaccaaga

SEQ ID NO: 15345 - RNA, 22 nt, synthetic construct
  source 1..22: mol_type = other RNA
tggtggcatgatgagtgtggag

SEQ ID NO: 15346 - RNA, 22 nt, synthetic construct
  source 1..22: mol_type = other RNA
tggtggtggcatgatgagtgtg

SEQ ID NO: 15347 - RNA, 22 nt, synthetic construct
  source 1..22: mol_type = other RNA
tggttgattttatagagtataa

SEQ ID NO: 15348 - RNA, 22 nt, synthetic construct
  source 1..22: mol_type = other RNA
tggtttgttatatttaccattt

SEQ ID NO: 15349 - RNA, 22 nt, synthetic construct
  source 1..22: mol_type = other RNA
tgtggagaaaacaacctaaatg

SEQ ID NO: 15350 - RNA, 22 nt, synthetic construct
  source 1..22: mol_type = other RNA
tgttatatttaccatttaggtt

SEQ ID NO: 15351 - RNA, 22 nt, synthetic construct
  source 1..22: mol_type = other RNA
tgttgatccatccaacagattc

SEQ ID NO: 15352 - RNA, 22 nt, synthetic construct
  source 1..22: mol_type = other RNA
tgttggatggatcaacattttg

SEQ ID NO: 15353 - RNA, 22 nt, synthetic construct
  source 1..22: mol_type = other RNA
tgttttctccacactcatcatg

SEQ ID NO: 15354 - RNA, 22 nt, synthetic construct
  source 1..22: mol_type = other RNA
ttaaattgcatatctatctcct

SEQ ID NO: 15355 - RNA, 22 nt, synthetic construct
  source 1..22: mol_type = other RNA
ttaaatttgcctcagttcattc

SEQ ID NO: 15356 - RNA, 22 nt, synthetic construct
  source 1..22: mol_type = other RNA
ttaaggaaaccaaatagaggaa

SEQ ID NO: 15357 - RNA, 22 nt, synthetic construct
  source 1..22: mol_type = other RNA
ttaccatttaggttgttttctc

SEQ ID NO: 15358 - RNA, 22 nt, synthetic construct
  source 1..22: mol_type = other RNA
ttagattttgctcttggtttgt

SEQ ID NO: 15359 - RNA, 22 nt, synthetic construct
  source 1..22: mol_type = other RNA
ttaggaggctggtggtggcatg

SEQ ID NO: 15360 - RNA, 22 nt, synthetic construct
  source 1..22: mol_type = other RNA
ttaggttgttttctccacactc

SEQ ID NO: 15361 - RNA, 22 nt, synthetic construct
  source 1..22: mol_type = other RNA
ttatactctataaaatcaacca

SEQ ID NO: 15362 - RNA, 22 nt, synthetic construct
  source 1..22: mol_type = other RNA
ttatagagtataaccttccatt

SEQ ID NO: 15363 - RNA, 22 nt, synthetic construct
  source 1..22: mol_type = other RNA
ttatatttaccatttaggttgt

SEQ ID NO: 15364 - RNA, 22 nt, synthetic construct
  source 1..22: mol_type = other RNA
ttatcttggaagtctcaaaatg

SEQ ID NO: 15365 - RNA, 22 nt, synthetic construct
  source 1..22: mol_type = other RNA
ttattgccttttaaatttgcct

SEQ ID NO: 15366 - RNA, 22 nt, synthetic construct
  source 1..22: mol_type = other RNA
ttcaaagctttctgaatctgtt

SEQ ID NO: 15367 - RNA, 22 nt, synthetic construct
  source 1..22: mol_type = other RNA
ttcagaaagctttgaatgaact

SEQ ID NO: 15368 - RNA, 22 nt, synthetic construct
  source 1..22: mol_type = other RNA
ttcattcaaagctttctgaatc

SEQ ID NO: 15369 - RNA, 22 nt, synthetic construct
  source 1..22: mol_type = other RNA
ttccaagataatcctcttctcc

SEQ ID NO: 15370 - RNA, 22 nt, synthetic construct
  source 1..22: mol_type = other RNA
ttccattttgagacttccaaga

SEQ ID NO: 15371 - RNA, 22 nt, synthetic construct
  source 1..22: mol_type = other RNA
ttcctctatttggtttccttaa

SEQ ID NO: 15372 - RNA, 22 nt, synthetic construct
  source 1..22: mol_type = other RNA
ttctccacactcatcatgccac

SEQ ID NO: 15373 - RNA, 22 nt, synthetic construct
  source 1..22: mol_type = other RNA
ttctcctctctggcttagattt

SEQ ID NO: 15374 - RNA, 22 nt, synthetic construct
  source 1..22: mol_type = other RNA
ttctgaatctgttggatggatc

SEQ ID NO: 15375 - RNA, 22 nt, synthetic construct
  source 1..22: mol_type = other RNA
ttgaatgaactgaggcaaattt

SEQ ID NO: 15376 - RNA, 22 nt, synthetic construct
  source 1..22: mol_type = other RNA
ttgagacttccaagataatcct

SEQ ID NO: 15377 - RNA, 22 nt, synthetic construct
  source 1..22: mol_type = other RNA
ttgatccatccaacagattcag

SEQ ID NO: 15378 - RNA, 22 nt, synthetic construct
  source 1..22: mol_type = other RNA
ttgattttatagagtataacct

SEQ ID NO: 15379 - RNA, 22 nt, synthetic construct
  source 1..22: mol_type = other RNA
ttgcatatctatctcctttagg

SEQ ID NO: 15380 - RNA, 22 nt, synthetic construct
  source 1..22: mol_type = other RNA
ttgcctcagttcattcaaagct

SEQ ID NO: 15381 - RNA, 22 nt, synthetic construct
  source 1..22: mol_type = other RNA
ttgccttttaaatttgcctcag

SEQ ID NO: 15382 - RNA, 22 nt, synthetic construct
  source 1..22: mol_type = other RNA
ttgctcttggtttgttatattt

SEQ ID NO: 15383 - RNA, 22 nt, synthetic construct
  source 1..22: mol_type = other RNA
ttgcttcctctatttggtttcc

SEQ ID NO: 15384 - RNA, 22 nt, synthetic construct
  source 1..22: mol_type = other RNA
ttggaagtctcaaaatggaagg

SEQ ID NO: 15385 - RNA, 22 nt, synthetic construct
  source 1..22: mol_type = other RNA
ttggatggatcaacattttggt

SEQ ID NO: 15386 - RNA, 22 nt, synthetic construct
  source 1..22: mol_type = other RNA
ttggttgattttatagagtata

SEQ ID NO: 15387 - RNA, 22 nt, synthetic construct
  source 1..22: mol_type = other RNA
ttggtttgttatatttaccatt

SEQ ID NO: 15388 - RNA, 22 nt, synthetic construct
  source 1..22: mol_type = other RNA
ttgttatatttaccatttaggt

SEQ ID NO: 15389 - RNA, 22 nt, synthetic construct
  source 1..22: mol_type = other RNA
ttgttttctccacactcatcat

SEQ ID NO: 15390 - RNA, 22 nt, synthetic construct
  source 1..22: mol_type = other RNA
tttaaatttgcctcagttcatt

SEQ ID NO: 15391 - RNA, 22 nt, synthetic construct
  source 1..22: mol_type = other RNA
tttaaggaaaccaaatagagga

SEQ ID NO: 15392 - RNA, 22 nt, synthetic construct
  source 1..22: mol_type = other RNA
tttaccatttaggttgttttct

SEQ ID NO: 15393 - RNA, 22 nt, synthetic construct
  source 1..22: mol_type = other RNA
tttaggaggctggtggtggcat

SEQ ID NO: 15394 - RNA, 22 nt, synthetic construct
  source 1..22: mol_type = other RNA
tttaggttgttttctccacact

SEQ ID NO: 15395 - RNA, 22 nt, synthetic construct
  source 1..22: mol_type = other RNA
tttatagagtataaccttccat

SEQ ID NO: 15396 - RNA, 22 nt, synthetic construct
  source 1..22: mol_type = other RNA
tttctccacactcatcatgcca

SEQ ID NO: 15397 - RNA, 22 nt, synthetic construct
  source 1..22: mol_type = other RNA
tttctgaatctgttggatggat

SEQ ID NO: 15398 - RNA, 22 nt, synthetic construct
  source 1..22: mol_type = other RNA
tttgaatgaactgaggcaaatt

SEQ ID NO: 15399 - RNA, 22 nt, synthetic construct
  source 1..22: mol_type = other RNA
tttgagacttccaagataatcc

SEQ ID NO: 15400 - RNA, 22 nt, synthetic construct
  source 1..22: mol_type = other RNA
tttgcctcagttcattcaaagc

SEQ ID NO: 15401 - RNA, 22 nt, synthetic construct
  source 1..22: mol_type = other RNA
tttgctcttggtttgttatatt

SEQ ID NO: 15402 - RNA, 22 nt, synthetic construct
  source 1..22: mol_type = other RNA
tttggttgattttatagagtat

SEQ ID NO: 15403 - RNA, 22 nt, synthetic construct
  source 1..22: mol_type = other RNA
tttgttatatttaccatttagg

SEQ ID NO: 15404 - RNA, 22 nt, synthetic construct
  source 1..22: mol_type = other RNA
ttttaaatttgcctcagttcat

SEQ ID NO: 15405 - RNA, 22 nt, synthetic construct
  source 1..22: mol_type = other RNA
ttttaaggaaaccaaatagagg

SEQ ID NO: 15406 - RNA, 22 nt, synthetic construct
  source 1..22: mol_type = other RNA
ttttatagagtataaccttcca

SEQ ID NO: 15407 - RNA, 22 nt, synthetic construct
  source 1..22: mol_type = other RNA
ttttctccacactcatcatgcc

SEQ ID NO: 15408 - RNA, 22 nt, synthetic construct
  source 1..22: mol_type = other RNA
ttttgagacttccaagataatc

SEQ ID NO: 15409 - RNA, 22 nt, synthetic construct
  source 1..22: mol_type = other RNA
ttttgctcttggtttgttatat

SEQ ID NO: 15410 - RNA, 22 nt, synthetic construct
  source 1..22: mol_type = other RNA
ttttggttgattttatagagta

SEQ ID NO: 15411 - RNA, 22 nt, synthetic construct
  source 1..22: mol_type = other RNA
tttttaaggaaaccaaatagag

SEQ ID NO: 15412 - RNA, 22 nt, synthetic construct
  source 1..22: mol_type = other RNA
ttttttaaggaaaccaaataga

SEQ ID NO: 15413 - RNA, 20 nt, synthetic construct
  source 1..20: mol_type = other RNA
aaaaaacactttctctctga

SEQ ID NO: 15414 - RNA, 20 nt, synthetic construct
  source 1..20: mol_type = other RNA
aaaaaatgaggagcatataa

SEQ ID NO: 15415 - RNA, 20 nt, synthetic construct
  source 1..20: mol_type = other RNA
aaaaaatgttattaatctcc

SEQ ID NO: 15416 - RNA, 20 nt, synthetic construct
  source 1..20: mol_type = other RNA
aaaaacactttctctctgaa

SEQ ID NO: 15417 - RNA, 20 nt, synthetic construct
  source 1..20: mol_type = other RNA
aaaaacaggtagtcaccata

SEQ ID NO: 15418 - RNA, 20 nt, synthetic construct
  source 1..20: mol_type = other RNA
aaaaacttatgatgggcaag

SEQ ID NO: 15419 - RNA, 20 nt, synthetic construct
  source 1..20: mol_type = other RNA
aaaaagaggagattaataac

SEQ ID NO: 15420 - RNA, 20 nt, synthetic construct
  source 1..20: mol_type = other RNA
aaaaatgaggagcatataat

SEQ ID NO: 15421 - RNA, 20 nt, synthetic construct
  source 1..20: mol_type = other RNA
aaaaatgttattaatctcct

SEQ ID NO: 15422 - RNA, 20 nt, synthetic construct
  source 1..20: mol_type = other RNA
aaaacactttctctctgaag

SEQ ID NO: 15423 - RNA, 20 nt, synthetic construct
  source 1..20: mol_type = other RNA
aaaacaggtagtcaccatag

SEQ ID NO: 15424 - RNA, 20 nt, synthetic construct
  source 1..20: mol_type = other RNA
aaaacagttccacgttgctt

SEQ ID NO: 15425 - RNA, 20 nt, synthetic construct
  source 1..20: mol_type = other RNA
aaaacttatgatgggcaagc

SEQ ID NO: 15426 - RNA, 20 nt, synthetic construct
  source 1..20: mol_type = other RNA
aaaagaactaaagtacagtt

SEQ ID NO: 15427 - RNA, 20 nt, synthetic construct
  source 1..20: mol_type = other RNA
aaaagaattgcttgagccca

SEQ ID NO: 15428 - RNA, 20 nt, synthetic construct
  source 1..20: mol_type = other RNA
aaaagaggagattaataaca

SEQ ID NO: 15429 - RNA, 20 nt, synthetic construct
  source 1..20: mol_type = other RNA
aaaagggagtgaaatgtctt

SEQ ID NO: 15430 - RNA, 20 nt, synthetic construct
  source 1..20: mol_type = other RNA
aaaaggtaaggttggtaggt

SEQ ID NO: 15431 - RNA, 20 nt, synthetic construct
  source 1..20: mol_type = other RNA
aaaagtttatttttgacttg

SEQ ID NO: 15432 - RNA, 20 nt, synthetic construct
  source 1..20: mol_type = other RNA
aaaataaacttttttgttgg

SEQ ID NO: 15433 - RNA, 20 nt, synthetic construct
  source 1..20: mol_type = other RNA
aaaatcccatatatagtaag

SEQ ID NO: 15434 - RNA, 20 nt, synthetic construct
  source 1..20: mol_type = other RNA
aaaatgaggagcatataatt

SEQ ID NO: 15435 - RNA, 20 nt, synthetic construct
  source 1..20: mol_type = other RNA
aaaatgttattaatctcctc

SEQ ID NO: 15436 - RNA, 20 nt, synthetic construct
  source 1..20: mol_type = other RNA
aaaattgttactaagctaac

SEQ ID NO: 15437 - RNA, 20 nt, synthetic construct
  source 1..20: mol_type = other RNA
aaacactttctctctgaagc

SEQ ID NO: 15438 - RNA, 20 nt, synthetic construct
  source 1..20: mol_type = other RNA
aaacaggtagtcaccatagc

SEQ ID NO: 15439 - RNA, 20 nt, synthetic construct
  source 1..20: mol_type = other RNA
aaacagtgatccattccaaa

SEQ ID NO: 15440 - RNA, 20 nt, synthetic construct
  source 1..20: mol_type = other RNA
aaacagttccacgttgcttg

SEQ ID NO: 15441 - RNA, 20 nt, synthetic construct
  source 1..20: mol_type = other RNA
aaactacacattcaatgcta

SEQ ID NO: 15442 - RNA, 20 nt, synthetic construct
  source 1..20: mol_type = other RNA
aaactagaattgaatcttaa

SEQ ID NO: 15443 - RNA, 20 nt, synthetic construct
  source 1..20: mol_type = other RNA
aaactgtactttagttcttt

SEQ ID NO: 15444 - RNA, 20 nt, synthetic construct
  source 1..20: mol_type = other RNA
aaacttatgatgggcaagct

SEQ ID NO: 15445 - RNA, 20 nt, synthetic construct
  source 1..20: mol_type = other RNA
aaacttcagaaaaacttatg

SEQ ID NO: 15446 - RNA, 20 nt, synthetic construct
  source 1..20: mol_type = other RNA
aaacttttttgttgggtaaa

SEQ ID NO: 15447 - RNA, 20 nt, synthetic construct
  source 1..20: mol_type = other RNA
aaagaaatgagcaactaact

SEQ ID NO: 15448 - RNA, 20 nt, synthetic construct
  source 1..20: mol_type = other RNA
aaagaactaaagtacagttt

SEQ ID NO: 15449 - RNA, 20 nt, synthetic construct
  source 1..20: mol_type = other RNA
aaagaattgcttgagcccag

SEQ ID NO: 15450 - RNA, 20 nt, synthetic construct
  source 1..20: mol_type = other RNA
aaagacatttcactcccttt

SEQ ID NO: 15451 - RNA, 20 nt, synthetic construct
  source 1..20: mol_type = other RNA
aaagagcctagaacacagag

SEQ ID NO: 15452 - RNA, 20 nt, synthetic construct
  source 1..20: mol_type = other RNA
aaagaggagattaataacat

SEQ ID NO: 15453 - RNA, 20 nt, synthetic construct
  source 1..20: mol_type = other RNA
aaagatgatgtcttaatgta

SEQ ID NO: 15454 - RNA, 20 nt, synthetic construct
  source 1..20: mol_type = other RNA
aaaggcttcagagagaaagt

SEQ ID NO: 15455 - RNA, 20 nt, synthetic construct
  source 1..20: mol_type = other RNA
aaagggagtgaaatgtcttt

SEQ ID NO: 15456 - RNA, 20 nt, synthetic construct
  source 1..20: mol_type = other RNA
aaaggtaaggttggtaggtg

SEQ ID NO: 15457 - RNA, 20 nt, synthetic construct
  source 1..20: mol_type = other RNA
aaagtaatgaattaagtatg

SEQ ID NO: 15458 - RNA, 20 nt, synthetic construct
  source 1..20: mol_type = other RNA
aaagtacagtttgagaaatg

SEQ ID NO: 15459 - RNA, 20 nt, synthetic construct
  source 1..20: mol_type = other RNA
aaagtgttttttggaatgga

SEQ ID NO: 15460 - RNA, 20 nt, synthetic construct
  source 1..20: mol_type = other RNA
aaagttgaggggaaaaaagt

SEQ ID NO: 15461 - RNA, 20 nt, synthetic construct
  source 1..20: mol_type = other RNA
aaagtttatttttgacttgt

SEQ ID NO: 15462 - RNA, 20 nt, synthetic construct
  source 1..20: mol_type = other RNA
aaataaacttttttgttggg

SEQ ID NO: 15463 - RNA, 20 nt, synthetic construct
  source 1..20: mol_type = other RNA
aaatacaatttcaaattacc

SEQ ID NO: 15464 - RNA, 20 nt, synthetic construct
  source 1..20: mol_type = other RNA
aaataccttcaatgtcacaa

SEQ ID NO: 15465 - RNA, 20 nt, synthetic construct
  source 1..20: mol_type = other RNA
aaatactgggctcaagcaat

SEQ ID NO: 15466 - RNA, 20 nt, synthetic construct
  source 1..20: mol_type = other RNA
aaatattggtatatatagag

SEQ ID NO: 15467 - RNA, 20 nt, synthetic construct
  source 1..20: mol_type = other RNA
aaatcaaagaaatgagcaac

SEQ ID NO: 15468 - RNA, 20 nt, synthetic construct
  source 1..20: mol_type = other RNA
aaatcccatatatagtaagt

SEQ ID NO: 15469 - RNA, 20 nt, synthetic construct
  source 1..20: mol_type = other RNA
aaatgaaatcaaagaaatga

SEQ ID NO: 15470 - RNA, 20 nt, synthetic construct
  source 1..20: mol_type = other RNA
aaatgagcaactaacttaat

SEQ ID NO: 15471 - RNA, 20 nt, synthetic construct
  source 1..20: mol_type = other RNA
aaatgaggagcatataatta

SEQ ID NO: 15472 - RNA, 20 nt, synthetic construct
  source 1..20: mol_type = other RNA
aaatgcatacttaattcatt

SEQ ID NO: 15473 - RNA, 20 nt, synthetic construct
  source 1..20: mol_type = other RNA
aaatgtctttaatgacactt

SEQ ID NO: 15474 - RNA, 20 nt, synthetic construct
  source 1..20: mol_type = other RNA
aaatgttattaatctcctct

SEQ ID NO: 15475 - RNA, 20 nt, synthetic construct
  source 1..20: mol_type = other RNA
aaattacctattaagttagt

SEQ ID NO: 15476 - RNA, 20 nt, synthetic construct
  source 1..20: mol_type = other RNA
aaattagcttttaaaaacag

SEQ ID NO: 15477 - RNA, 20 nt, synthetic construct
  source 1..20: mol_type = other RNA
aaattgtatttaactttgct

SEQ ID NO: 15478 - RNA, 20 nt, synthetic construct
  source 1..20: mol_type = other RNA
aaattgttactaagctaaca

SEQ ID NO: 15479 - RNA, 20 nt, synthetic construct
  source 1..20: mol_type = other RNA
aaatttacccaacaaaaaag

SEQ ID NO: 15480 - RNA, 20 nt, synthetic construct
  source 1..20: mol_type = other RNA
aacaaaaagaggagattaat

SEQ ID NO: 15481 - RNA, 20 nt, synthetic construct
  source 1..20: mol_type = other RNA
aacaaacttcagaaaaactt

SEQ ID NO: 15482 - RNA, 20 nt, synthetic construct
  source 1..20: mol_type = other RNA
aacaatggatatgtggtcat

SEQ ID NO: 15483 - RNA, 20 nt, synthetic construct
  source 1..20: mol_type = other RNA
aacaattatagtgacaaaaa

SEQ ID NO: 15484 - RNA, 20 nt, synthetic construct
  source 1..20: mol_type = other RNA
aacacagagacacagaacac

SEQ ID NO: 15485 - RNA, 20 nt, synthetic construct
  source 1..20: mol_type = other RNA
aacacagcattgagagccgt

SEQ ID NO: 15486 - RNA, 20 nt, synthetic construct
  source 1..20: mol_type = other RNA
aacacagtggagaaaaggga

SEQ ID NO: 15487 - RNA, 20 nt, synthetic construct
  source 1..20: mol_type = other RNA
aacaccacctgagggagtgg

SEQ ID NO: 15488 - RNA, 20 nt, synthetic construct
  source 1..20: mol_type = other RNA
aacacggcttaatgattaac

SEQ ID NO: 15489 - RNA, 20 nt, synthetic construct
  source 1..20: mol_type = other RNA
aacactttctctctgaagcc

SEQ ID NO: 15490 - RNA, 20 nt, synthetic construct
  source 1..20: mol_type = other RNA
aacaggtagtcaccatagca

SEQ ID NO: 15491 - RNA, 20 nt, synthetic construct
  source 1..20: mol_type = other RNA
aacagtgatccattccaaaa

SEQ ID NO: 15492 - RNA, 20 nt, synthetic construct
  source 1..20: mol_type = other RNA
aacagttccacgttgcttga

SEQ ID NO: 15493 - RNA, 20 nt, synthetic construct
  source 1..20: mol_type = other RNA
aacatagttaatcattaagc

SEQ ID NO: 15494 - RNA, 20 nt, synthetic construct
  source 1..20: mol_type = other RNA
aaccatccttgtatattgtc

SEQ ID NO: 15495 - RNA, 20 nt, synthetic construct
  source 1..20: mol_type = other RNA
aaccttaccttttctgggca

SEQ ID NO: 15496 - RNA, 20 nt, synthetic construct
  source 1..20: mol_type = other RNA
aaccttcttccacattgagt

SEQ ID NO: 15497 - RNA, 20 nt, synthetic construct
  source 1..20: mol_type = other RNA
aacgagcacatggtaaagag

SEQ ID NO: 15498 - RNA, 20 nt, synthetic construct
  source 1..20: mol_type = other RNA
aacgtggaactgttttcttc

SEQ ID NO: 15499 - RNA, 20 nt, synthetic construct
  source 1..20: mol_type = other RNA
aactaaagtacagtttgaga

SEQ ID NO: 15500 - RNA, 20 nt, synthetic construct
  source 1..20: mol_type = other RNA
aactaacttaataggtaatt

SEQ ID NO: 15501 - RNA, 20 nt, synthetic construct
  source 1..20: mol_type = other RNA
aactacacattcaatgctat

SEQ ID NO: 15502 - RNA, 20 nt, synthetic construct
  source 1..20: mol_type = other RNA
aactagaattgaatcttaaa

SEQ ID NO: 15503 - RNA, 20 nt, synthetic construct
  source 1..20: mol_type = other RNA
aactatgttcacctaccaac

SEQ ID NO: 15504 - RNA, 20 nt, synthetic construct
  source 1..20: mol_type = other RNA
aactcaatgtggaagaaggt

SEQ ID NO: 15505 - RNA, 20 nt, synthetic construct
  source 1..20: mol_type = other RNA
aactctatatataccaatat

SEQ ID NO: 15506 - RNA, 20 nt, synthetic construct
  source 1..20: mol_type = other RNA
aactgtactttagttctttt

SEQ ID NO: 15507 - RNA, 20 nt, synthetic construct
  source 1..20: mol_type = other RNA
aactgttttcttctggaagc

SEQ ID NO: 15508 - RNA, 20 nt, synthetic construct
  source 1..20: mol_type = other RNA
aacttaataggtaatttgaa

SEQ ID NO: 15509 - RNA, 20 nt, synthetic construct
  source 1..20: mol_type = other RNA
aacttatgatgggcaagctg

SEQ ID NO: 15510 - RNA, 20 nt, synthetic construct
  source 1..20: mol_type = other RNA
aacttcagaaaaacttatga

SEQ ID NO: 15511 - RNA, 20 nt, synthetic construct
  source 1..20: mol_type = other RNA
aacttgcacgaatgtaacct

SEQ ID NO: 15512 - RNA, 20 nt, synthetic construct
  source 1..20: mol_type = other RNA
aactttgctgtattataaac

SEQ ID NO: 15513 - RNA, 20 nt, synthetic construct
  source 1..20: mol_type = other RNA
aacttttttgttgggtaaat

SEQ ID NO: 15514 - RNA, 20 nt, synthetic construct
  source 1..20: mol_type = other RNA
aagaaaacagttccacgttg

SEQ ID NO: 15515 - RNA, 20 nt, synthetic construct
  source 1..20: mol_type = other RNA
aagaaatgagcaactaactt

SEQ ID NO: 15516 - RNA, 20 nt, synthetic construct
  source 1..20: mol_type = other RNA
aagaactaaagtacagtttg

SEQ ID NO: 15517 - RNA, 20 nt, synthetic construct
  source 1..20: mol_type = other RNA
aagaaggttacattcgtgca

SEQ ID NO: 15518 - RNA, 20 nt, synthetic construct
  source 1..20: mol_type = other RNA
aagaagtctaggtctgcttc

SEQ ID NO: 15519 - RNA, 20 nt, synthetic construct
  source 1..20: mol_type = other RNA
aagaattgcttgagcccagt

SEQ ID NO: 15520 - RNA, 20 nt, synthetic construct
  source 1..20: mol_type = other RNA
aagacatataaggtgatgca

SEQ ID NO: 15521 - RNA, 20 nt, synthetic construct
  source 1..20: mol_type = other RNA
aagacatcatctttaaaaaa

SEQ ID NO: 15522 - RNA, 20 nt, synthetic construct
  source 1..20: mol_type = other RNA
aagacatttcactccctttt

SEQ ID NO: 15523 - RNA, 20 nt, synthetic construct
  source 1..20: mol_type = other RNA
aagagatttacaagtcaaaa

SEQ ID NO: 15524 - RNA, 20 nt, synthetic construct
  source 1..20: mol_type = other RNA
aagagcctagaacacagaga

SEQ ID NO: 15525 - RNA, 20 nt, synthetic construct
  source 1..20: mol_type = other RNA
aagaggagattaataacatt

SEQ ID NO: 15526 - RNA, 20 nt, synthetic construct
  source 1..20: mol_type = other RNA
aagatgatgtcttaatgtat

SEQ ID NO: 15527 - RNA, 20 nt, synthetic construct
  source 1..20: mol_type = other RNA
aagattcaattctagtttgg

SEQ ID NO: 15528 - RNA, 20 nt, synthetic construct
  source 1..20: mol_type = other RNA
aagcaacgtggaactgtttt

SEQ ID NO: 15529 - RNA, 20 nt, synthetic construct
  source 1..20: mol_type = other RNA
aagcagacctagacttctta

SEQ ID NO: 15530 - RNA, 20 nt, synthetic construct
  source 1..20: mol_type = other RNA
aagcagcttgcccatcataa

SEQ ID NO: 15531 - RNA, 20 nt, synthetic construct
  source 1..20: mol_type = other RNA
aagccgtgttaacttgcacg

SEQ ID NO: 15532 - RNA, 20 nt, synthetic construct
  source 1..20: mol_type = other RNA
aagcctttctccactccctc

SEQ ID NO: 15533 - RNA, 20 nt, synthetic construct
  source 1..20: mol_type = other RNA
aagctaacaaacttcagaaa

SEQ ID NO: 15534 - RNA, 20 nt, synthetic construct
  source 1..20: mol_type = other RNA
aagctgcttgtgacattgaa

SEQ ID NO: 15535 - RNA, 20 nt, synthetic construct
  source 1..20: mol_type = other RNA
aaggaacaatggatatgtgg

SEQ ID NO: 15536 - RNA, 20 nt, synthetic construct
  source 1..20: mol_type = other RNA
aaggatggttaagacatata

SEQ ID NO: 15537 - RNA, 20 nt, synthetic construct
  source 1..20: mol_type = other RNA
aaggcttcagagagaaagtg

SEQ ID NO: 15538 - RNA, 20 nt, synthetic construct
  source 1..20: mol_type = other RNA
aagggagtgaaatgtcttta

SEQ ID NO: 15539 - RNA, 20 nt, synthetic construct
  source 1..20: mol_type = other RNA
aaggtaaaagaattgcttga

SEQ ID NO: 15540 - RNA, 20 nt, synthetic construct
  source 1..20: mol_type = other RNA
aaggtaaggttggtaggtga

SEQ ID NO: 15541 - RNA, 20 nt, synthetic construct
  source 1..20: mol_type = other RNA
aaggtatttaagattcaatt

SEQ ID NO: 15542 - RNA, 20 nt, synthetic construct
  source 1..20: mol_type = other RNA
aaggttacattcgtgcaagt

SEQ ID NO: 15543 - RNA, 20 nt, synthetic construct
  source 1..20: mol_type = other RNA
aaggttggtaggtgaacata

SEQ ID NO: 15544 - RNA, 20 nt, synthetic construct
  source 1..20: mol_type = other RNA
aagtaatgaattaagtatgc

SEQ ID NO: 15545 - RNA, 20 nt, synthetic construct
  source 1..20: mol_type = other RNA
aagtacagtttgagaaatgc

SEQ ID NO: 15546 - RNA, 20 nt, synthetic construct
  source 1..20: mol_type = other RNA
aagtatgcatttctcaaact

SEQ ID NO: 15547 - RNA, 20 nt, synthetic construct
  source 1..20: mol_type = other RNA
aagtctaggtctgcttccag

SEQ ID NO: 15548 - RNA, 20 nt, synthetic construct
  source 1..20: mol_type = other RNA
aagtgtcattaaagacattt

SEQ ID NO: 15549 - RNA, 20 nt, synthetic construct
  source 1..20: mol_type = other RNA
aagtgttttttggaatggat

SEQ ID NO: 15550 - RNA, 20 nt, synthetic construct
  source 1..20: mol_type = other RNA
aagttaacacggcttaatga

SEQ ID NO: 15551 - RNA, 20 nt, synthetic construct
  source 1..20: mol_type = other RNA
aagttagttgctcatttctt

SEQ ID NO: 15552 - RNA, 20 nt, synthetic construct
  source 1..20: mol_type = other RNA
aagttgaggggaaaaaagta

SEQ ID NO: 15553 - RNA, 20 nt, synthetic construct
  source 1..20: mol_type = other RNA
aagtttatttttgacttgta

SEQ ID NO: 15554 - RNA, 20 nt, synthetic construct
  source 1..20: mol_type = other RNA
aagtttgttagcttagtaac

SEQ ID NO: 15555 - RNA, 20 nt, synthetic construct
  source 1..20: mol_type = other RNA
aagtttttctgaagtttgtt

SEQ ID NO: 15556 - RNA, 20 nt, synthetic construct
  source 1..20: mol_type = other RNA
aataaacttttttgttgggt

SEQ ID NO: 15557 - RNA, 20 nt, synthetic construct
  source 1..20: mol_type = other RNA
aataaatttacccaacaaaa

SEQ ID NO: 15558 - RNA, 20 nt, synthetic construct
  source 1..20: mol_type = other RNA
aataataaatttacccaaca

SEQ ID NO: 15559 - RNA, 20 nt, synthetic construct
  source 1..20: mol_type = other RNA
aatacaatttcaaattacct

SEQ ID NO: 15560 - RNA, 20 nt, synthetic construct
  source 1..20: mol_type = other RNA
aatacagcaaagttaaatac

SEQ ID NO: 15561 - RNA, 20 nt, synthetic construct
  source 1..20: mol_type = other RNA
aatacattaagacatcatct

SEQ ID NO: 15562 - RNA, 20 nt, synthetic construct
  source 1..20: mol_type = other RNA
aataccttcaatgtcacaag

SEQ ID NO: 15563 - RNA, 20 nt, synthetic construct
  source 1..20: mol_type = other RNA
aatactgggctcaagcaatt

SEQ ID NO: 15564 - RNA, 20 nt, synthetic construct
  source 1..20: mol_type = other RNA
aataggtaatttgaaattgt

SEQ ID NO: 15565 - RNA, 20 nt, synthetic construct
  source 1..20: mol_type = other RNA
aatatacaaggatggttaag

SEQ ID NO: 15566 - RNA, 20 nt, synthetic construct
  source 1..20: mol_type = other RNA
aatattggtatatatagagt

SEQ ID NO: 15567 - RNA, 20 nt, synthetic construct
  source 1..20: mol_type = other RNA
aatatttgcccagaaaaggt

SEQ ID NO: 15568 - RNA, 20 nt, synthetic construct
  source 1..20: mol_type = other RNA
aatcaaagaaatgagcaact

SEQ ID NO: 15569 - RNA, 20 nt, synthetic construct
  source 1..20: mol_type = other RNA
aatcattaagccgtgttaac

SEQ ID NO: 15570 - RNA, 20 nt, synthetic construct
  source 1..20: mol_type = other RNA
aatcccatatatagtaagtg

SEQ ID NO: 15571 - RNA, 20 nt, synthetic construct
  source 1..20: mol_type = other RNA
aatctcctctttttgttaaa

SEQ ID NO: 15572 - RNA, 20 nt, synthetic construct
  source 1..20: mol_type = other RNA
aatcttaaataccttcaatg

SEQ ID NO: 15573 - RNA, 20 nt, synthetic construct
  source 1..20: mol_type = other RNA
aatgaaatcaaagaaatgag

SEQ ID NO: 15574 - RNA, 20 nt, synthetic construct
  source 1..20: mol_type = other RNA
aatgaattaagtatgcattt

SEQ ID NO: 15575 - RNA, 20 nt, synthetic construct
  source 1..20: mol_type = other RNA
aatgacacttactatatatg

SEQ ID NO: 15576 - RNA, 20 nt, synthetic construct
  source 1..20: mol_type = other RNA
aatgagcaactaacttaata

SEQ ID NO: 15577 - RNA, 20 nt, synthetic construct
  source 1..20: mol_type = other RNA
aatgaggagcatataattat

SEQ ID NO: 15578 - RNA, 20 nt, synthetic construct
  source 1..20: mol_type = other RNA
aatgattaactatgttcacc

SEQ ID NO: 15579 - RNA, 20 nt, synthetic construct
  source 1..20: mol_type = other RNA
aatgcatacttaattcatta

SEQ ID NO: 15580 - RNA, 20 nt, synthetic construct
  source 1..20: mol_type = other RNA
aatgctaaatgaaatcaaag

SEQ ID NO: 15581 - RNA, 20 nt, synthetic construct
  source 1..20: mol_type = other RNA
aatgctatggtgactacctg

SEQ ID NO: 15582 - RNA, 20 nt, synthetic construct
  source 1..20: mol_type = other RNA
aatgctgtgttcctctggta

SEQ ID NO: 15583 - RNA, 20 nt, synthetic construct
  source 1..20: mol_type = other RNA
aatggatatgtggtcatcta

SEQ ID NO: 15584 - RNA, 20 nt, synthetic construct
  source 1..20: mol_type = other RNA
aatggatcactgtttccaaa

SEQ ID NO: 15585 - RNA, 20 nt, synthetic construct
  source 1..20: mol_type = other RNA
aatgtaaccttcttccacat

SEQ ID NO: 15586 - RNA, 20 nt, synthetic construct
  source 1..20: mol_type = other RNA
aatgtataattatatgctcc

SEQ ID NO: 15587 - RNA, 20 nt, synthetic construct
  source 1..20: mol_type = other RNA
aatgtattgcccatgctggt

SEQ ID NO: 15588 - RNA, 20 nt, synthetic construct
  source 1..20: mol_type = other RNA
aatgtcacaagcagcttgcc

SEQ ID NO: 15589 - RNA, 20 nt, synthetic construct
  source 1..20: mol_type = other RNA
aatgtctttaatgacactta

SEQ ID NO: 15590 - RNA, 20 nt, synthetic construct
  source 1..20: mol_type = other RNA
aatgtggaagaaggttacat

SEQ ID NO: 15591 - RNA, 20 nt, synthetic construct
  source 1..20: mol_type = other RNA
aatgtgtagtttataataca

SEQ ID NO: 15592 - RNA, 20 nt, synthetic construct
  source 1..20: mol_type = other RNA
aatgttattaatctcctctt

SEQ ID NO: 15593 - RNA, 20 nt, synthetic construct
  source 1..20: mol_type = other RNA
aattaagtatgcatttctca

SEQ ID NO: 15594 - RNA, 20 nt, synthetic construct
  source 1..20: mol_type = other RNA
aattacctattaagttagtt

SEQ ID NO: 15595 - RNA, 20 nt, synthetic construct
  source 1..20: mol_type = other RNA
aattagcttttaaaaacagg

SEQ ID NO: 15596 - RNA, 20 nt, synthetic construct
  source 1..20: mol_type = other RNA
aattatagtgacaaaaaatg

SEQ ID NO: 15597 - RNA, 20 nt, synthetic construct
  source 1..20: mol_type = other RNA
aattatatgctcctcatttt

SEQ ID NO: 15598 - RNA, 20 nt, synthetic construct
  source 1..20: mol_type = other RNA
aattcattacttttttcccc

SEQ ID NO: 15599 - RNA, 20 nt, synthetic construct
  source 1..20: mol_type = other RNA
aattctagtttggtcctaga

SEQ ID NO: 15600 - RNA, 20 nt, synthetic construct
  source 1..20: mol_type = other RNA
aattgaatcttaaatacctt

SEQ ID NO: 15601 - RNA, 20 nt, synthetic construct
  source 1..20: mol_type = other RNA
aattgcttgagcccagtatt

SEQ ID NO: 15602 - RNA, 20 nt, synthetic construct
  source 1..20: mol_type = other RNA
aattgtatttaactttgctg

SEQ ID NO: 15603 - RNA, 20 nt, synthetic construct
  source 1..20: mol_type = other RNA
aattgttactaagctaacaa

SEQ ID NO: 15604 - RNA, 20 nt, synthetic construct
  source 1..20: mol_type = other RNA
aatttacccaacaaaaaagt

SEQ ID NO: 15605 - RNA, 20 nt, synthetic construct
  source 1..20: mol_type = other RNA
aatttcaagcaacgtggaac

SEQ ID NO: 15606 - RNA, 20 nt, synthetic construct
  source 1..20: mol_type = other RNA
acaaaaaatgaggagcatat

SEQ ID NO: 15607 - RNA, 20 nt, synthetic construct
  source 1..20: mol_type = other RNA
acaaaaagaggagattaata

SEQ ID NO: 15608 - RNA, 20 nt, synthetic construct
  source 1..20: mol_type = other RNA
acaaaatcccatatatagta

SEQ ID NO: 15609 - RNA, 20 nt, synthetic construct
  source 1..20: mol_type = other RNA
acaaacttcagaaaaactta

SEQ ID NO: 15610 - RNA, 20 nt, synthetic construct
  source 1..20: mol_type = other RNA
acaagcagcttgcccatcat

SEQ ID NO: 15611 - RNA, 20 nt, synthetic construct
  source 1..20: mol_type = other RNA
acaaggatggttaagacata

SEQ ID NO: 15612 - RNA, 20 nt, synthetic construct
  source 1..20: mol_type = other RNA
acaagtcaaaaataaacttt

SEQ ID NO: 15613 - RNA, 20 nt, synthetic construct
  source 1..20: mol_type = other RNA
acaatatacaaggatggtta

SEQ ID NO: 15614 - RNA, 20 nt, synthetic construct
  source 1..20: mol_type = other RNA
acaatggatatgtggtcatc

SEQ ID NO: 15615 - RNA, 20 nt, synthetic construct
  source 1..20: mol_type = other RNA
acaattatagtgacaaaaaa

SEQ ID NO: 15616 - RNA, 20 nt, synthetic construct
  source 1..20: mol_type = other RNA
acaatttcaaattacctatt

SEQ ID NO: 15617 - RNA, 20 nt, synthetic construct
  source 1..20: mol_type = other RNA
acacagaacacagtggagaa

SEQ ID NO: 15618 - RNA, 20 nt, synthetic construct
  source 1..20: mol_type = other RNA
acacagagacacagaacaca

SEQ ID NO: 15619 - RNA, 20 nt, synthetic construct
  source 1..20: mol_type = other RNA
acacagcattgagagccgta

SEQ ID NO: 15620 - RNA, 20 nt, synthetic construct
  source 1..20: mol_type = other RNA
acacagtggagaaaagggag

SEQ ID NO: 15621 - RNA, 20 nt, synthetic construct
  source 1..20: mol_type = other RNA
acacattcaatgctatggtg

SEQ ID NO: 15622 - RNA, 20 nt, synthetic construct
  source 1..20: mol_type = other RNA
acaccacctgagggagtgga

SEQ ID NO: 15623 - RNA, 20 nt, synthetic construct
  source 1..20: mol_type = other RNA
acacggcttaatgattaact

SEQ ID NO: 15624 - RNA, 20 nt, synthetic construct
  source 1..20: mol_type = other RNA
acacttactatatatgggat

SEQ ID NO: 15625 - RNA, 20 nt, synthetic construct
  source 1..20: mol_type = other RNA
acactttctctctgaagcct

SEQ ID NO: 15626 - RNA, 20 nt, synthetic construct
  source 1..20: mol_type = other RNA
acagaacacagtggagaaaa

SEQ ID NO: 15627 - RNA, 20 nt, synthetic construct
  source 1..20: mol_type = other RNA
acagagacacagaacacagt

SEQ ID NO: 15628 - RNA, 20 nt, synthetic construct
  source 1..20: mol_type = other RNA
acagagtaccagaggaacac

SEQ ID NO: 15629 - RNA, 20 nt, synthetic construct
  source 1..20: mol_type = other RNA
acagcaaagttaaatacaat

SEQ ID NO: 15630 - RNA, 20 nt, synthetic construct
  source 1..20: mol_type = other RNA
acagcattgagagccgtaac

SEQ ID NO: 15631 - RNA, 20 nt, synthetic construct
  source 1..20: mol_type = other RNA
acaggtagtcaccatagcat

SEQ ID NO: 15632 - RNA, 20 nt, synthetic construct
  source 1..20: mol_type = other RNA
acagtgatccattccaaaaa

SEQ ID NO: 15633 - RNA, 20 nt, synthetic construct
  source 1..20: mol_type = other RNA
acagtggagaaaagggagtg

SEQ ID NO: 15634 - RNA, 20 nt, synthetic construct
  source 1..20: mol_type = other RNA
acagttccacgttgcttgaa

SEQ ID NO: 15635 - RNA, 20 nt, synthetic construct
  source 1..20: mol_type = other RNA
acagtttgagaaatgcatac

SEQ ID NO: 15636 - RNA, 20 nt, synthetic construct
  source 1..20: mol_type = other RNA
acatagttaatcattaagcc

SEQ ID NO: 15637 - RNA, 20 nt, synthetic construct
  source 1..20: mol_type = other RNA
acatataaggtgatgcaaaa

SEQ ID NO: 15638 - RNA, 20 nt, synthetic construct
  source 1..20: mol_type = other RNA
acatatccattgttccttca

SEQ ID NO: 15639 - RNA, 20 nt, synthetic construct
  source 1..20: mol_type = other RNA
acatattaacaattatagtg

SEQ ID NO: 15640 - RNA, 20 nt, synthetic construct
  source 1..20: mol_type = other RNA
acatggtaaagagcctagaa

SEQ ID NO: 15641 - RNA, 20 nt, synthetic construct
  source 1..20: mol_type = other RNA
acattaagacatcatcttta

SEQ ID NO: 15642 - RNA, 20 nt, synthetic construct
  source 1..20: mol_type = other RNA
acattcaatgctatggtgac

SEQ ID NO: 15643 - RNA, 20 nt, synthetic construct
  source 1..20: mol_type = other RNA
acattcgtgcaagttaacac

SEQ ID NO: 15644 - RNA, 20 nt, synthetic construct
  source 1..20: mol_type = other RNA
acattgaaggtatttaagat

SEQ ID NO: 15645 - RNA, 20 nt, synthetic construct
  source 1..20: mol_type = other RNA
acattgagttagatcaatgc

SEQ ID NO: 15646 - RNA, 20 nt, synthetic construct
  source 1..20: mol_type = other RNA
acattgatttatacagagta

SEQ ID NO: 15647 - RNA, 20 nt, synthetic construct
  source 1..20: mol_type = other RNA
acatttaacaaaaagaggag

SEQ ID NO: 15648 - RNA, 20 nt, synthetic construct
  source 1..20: mol_type = other RNA
acatttcactcccttttctc

SEQ ID NO: 15649 - RNA, 20 nt, synthetic construct
  source 1..20: mol_type = other RNA
accaaactagaattgaatct

SEQ ID NO: 15650 - RNA, 20 nt, synthetic construct
  source 1..20: mol_type = other RNA
accaaccttaccttttctgg

SEQ ID NO: 15651 - RNA, 20 nt, synthetic construct
  source 1..20: mol_type = other RNA
accaatatttgcccagaaaa

SEQ ID NO: 15652 - RNA, 20 nt, synthetic construct
  source 1..20: mol_type = other RNA
accacatatccattgttcct

SEQ ID NO: 15653 - RNA, 20 nt, synthetic construct
  source 1..20: mol_type = other RNA
accacctgagggagtggaga

SEQ ID NO: 15654 - RNA, 20 nt, synthetic construct
  source 1..20: mol_type = other RNA
accagaggaacacagcattg

SEQ ID NO: 15655 - RNA, 20 nt, synthetic construct
  source 1..20: mol_type = other RNA
accagcatgggcaatacatt

SEQ ID NO: 15656 - RNA, 20 nt, synthetic construct
  source 1..20: mol_type = other RNA
accatagcattgaatgtgta

SEQ ID NO: 15657 - RNA, 20 nt, synthetic construct
  source 1..20: mol_type = other RNA
accatccttgtatattgtca

SEQ ID NO: 15658 - RNA, 20 nt, synthetic construct
  source 1..20: mol_type = other RNA
accatgtgctcgttgaagga

SEQ ID NO: 15659 - RNA, 20 nt, synthetic construct
  source 1..20: mol_type = other RNA
acccaacaaaaaagtttatt

SEQ ID NO: 15660 - RNA, 20 nt, synthetic construct
  source 1..20: mol_type = other RNA
acctaccaaccttacctttt

SEQ ID NO: 15661 - RNA, 20 nt, synthetic construct
  source 1..20: mol_type = other RNA
acctagacttcttaactcta

SEQ ID NO: 15662 - RNA, 20 nt, synthetic construct
  source 1..20: mol_type = other RNA
acctattaagttagttgctc

SEQ ID NO: 15663 - RNA, 20 nt, synthetic construct
  source 1..20: mol_type = other RNA
acctgagggagtggagaaag

SEQ ID NO: 15664 - RNA, 20 nt, synthetic construct
  source 1..20: mol_type = other RNA
acctgtttttaaaagctaat

SEQ ID NO: 15665 - RNA, 20 nt, synthetic construct
  source 1..20: mol_type = other RNA
accttaccttttctgggcaa

SEQ ID NO: 15666 - RNA, 20 nt, synthetic construct
  source 1..20: mol_type = other RNA
accttatatgtcttaaccat

SEQ ID NO: 15667 - RNA, 20 nt, synthetic construct
  source 1..20: mol_type = other RNA
accttcaatgtcacaagcag

SEQ ID NO: 15668 - RNA, 20 nt, synthetic construct
  source 1..20: mol_type = other RNA
accttcttccacattgagtt

SEQ ID NO: 15669 - RNA, 20 nt, synthetic construct
  source 1..20: mol_type = other RNA
accttttctgggcaaatatt

SEQ ID NO: 15670 - RNA, 20 nt, synthetic construct
  source 1..20: mol_type = other RNA
acgaatgtaaccttcttcca

SEQ ID NO: 15671 - RNA, 20 nt, synthetic construct
  source 1..20: mol_type = other RNA
acgagcacatggtaaagagc

SEQ ID NO: 15672 - RNA, 20 nt, synthetic construct
  source 1..20: mol_type = other RNA
acggctctcaatgctgtgtt

SEQ ID NO: 15673 - RNA, 20 nt, synthetic construct
  source 1..20: mol_type = other RNA
acggcttaatgattaactat

SEQ ID NO: 15674 - RNA, 20 nt, synthetic construct
  source 1..20: mol_type = other RNA
acgtggaactgttttcttct

SEQ ID NO: 15675 - RNA, 20 nt, synthetic construct
  source 1..20: mol_type = other RNA
acgttgcttgaaattgaaaa

SEQ ID NO: 15676 - RNA, 20 nt, synthetic construct
  source 1..20: mol_type = other RNA
actaaagtacagtttgagaa

SEQ ID NO: 15677 - RNA, 20 nt, synthetic construct
  source 1..20: mol_type = other RNA
actaacttaataggtaattt

SEQ ID NO: 15678 - RNA, 20 nt, synthetic construct
  source 1..20: mol_type = other RNA
actaagctaacaaacttcag

SEQ ID NO: 15679 - RNA, 20 nt, synthetic construct
  source 1..20: mol_type = other RNA
actacacattcaatgctatg

SEQ ID NO: 15680 - RNA, 20 nt, synthetic construct
  source 1..20: mol_type = other RNA
actacctgtttttaaaagct

SEQ ID NO: 15681 - RNA, 20 nt, synthetic construct
  source 1..20: mol_type = other RNA
actagaattgaatcttaaat

SEQ ID NO: 15682 - RNA, 20 nt, synthetic construct
  source 1..20: mol_type = other RNA
actatatatgggattttgtg

SEQ ID NO: 15683 - RNA, 20 nt, synthetic construct
  source 1..20: mol_type = other RNA
actatgttcacctaccaacc

SEQ ID NO: 15684 - RNA, 20 nt, synthetic construct
  source 1..20: mol_type = other RNA
actcaatgtggaagaaggtt

SEQ ID NO: 15685 - RNA, 20 nt, synthetic construct
  source 1..20: mol_type = other RNA
actccctcaggtggtgttac

SEQ ID NO: 15686 - RNA, 20 nt, synthetic construct
  source 1..20: mol_type = other RNA
actcccttttctccactgtg

SEQ ID NO: 15687 - RNA, 20 nt, synthetic construct
  source 1..20: mol_type = other RNA
actctatatataccaatatt

SEQ ID NO: 15688 - RNA, 20 nt, synthetic construct
  source 1..20: mol_type = other RNA
actctgtataaatcaatgta

SEQ ID NO: 15689 - RNA, 20 nt, synthetic construct
  source 1..20: mol_type = other RNA
actgggctcaagcaattctt

SEQ ID NO: 15690 - RNA, 20 nt, synthetic construct
  source 1..20: mol_type = other RNA
actgtactttagttcttttg

SEQ ID NO: 15691 - RNA, 20 nt, synthetic construct
  source 1..20: mol_type = other RNA
actgtgttctgtgtctctgt

SEQ ID NO: 15692 - RNA, 20 nt, synthetic construct
  source 1..20: mol_type = other RNA
actgtttccaaaagaactaa

SEQ ID NO: 15693 - RNA, 20 nt, synthetic construct
  source 1..20: mol_type = other RNA
actgttttcttctggaagca

SEQ ID NO: 15694 - RNA, 20 nt, synthetic construct
  source 1..20: mol_type = other RNA
acttaataggtaatttgaaa

SEQ ID NO: 15695 - RNA, 20 nt, synthetic construct
  source 1..20: mol_type = other RNA
acttactatatatgggattt

SEQ ID NO: 15696 - RNA, 20 nt, synthetic construct
  source 1..20: mol_type = other RNA
acttatgatgggcaagctgc

SEQ ID NO: 15697 - RNA, 20 nt, synthetic construct
  source 1..20: mol_type = other RNA
acttcagaaaaacttatgat

SEQ ID NO: 15698 - RNA, 20 nt, synthetic construct
  source 1..20: mol_type = other RNA
acttcttaactctatatata

SEQ ID NO: 15699 - RNA, 20 nt, synthetic construct
  source 1..20: mol_type = other RNA
acttgcacgaatgtaacctt

SEQ ID NO: 15700 - RNA, 20 nt, synthetic construct
  source 1..20: mol_type = other RNA
acttgtaaatctcttaaaat

SEQ ID NO: 15701 - RNA, 20 nt, synthetic construct
  source 1..20: mol_type = other RNA
actttagttcttttggaaac

SEQ ID NO: 15702 - RNA, 20 nt, synthetic construct
  source 1..20: mol_type = other RNA
actttctctctgaagccttt

SEQ ID NO: 15703 - RNA, 20 nt, synthetic construct
  source 1..20: mol_type = other RNA
actttgctgtattataaact

SEQ ID NO: 15704 - RNA, 20 nt, synthetic construct
  source 1..20: mol_type = other RNA
acttttttcccctcaacttt

SEQ ID NO: 15705 - RNA, 20 nt, synthetic construct
  source 1..20: mol_type = other RNA
acttttttgttgggtaaatt

SEQ ID NO: 15706 - RNA, 20 nt, synthetic construct
  source 1..20: mol_type = other RNA
agaaaaacttatgatgggca

SEQ ID NO: 15707 - RNA, 20 nt, synthetic construct
  source 1..20: mol_type = other RNA
agaaaacagttccacgttgc

SEQ ID NO: 15708 - RNA, 20 nt, synthetic construct
  source 1..20: mol_type = other RNA
agaaaagggagtgaaatgtc

SEQ ID NO: 15709 - RNA, 20 nt, synthetic construct
  source 1..20: mol_type = other RNA
agaaaaggtaaggttggtag

SEQ ID NO: 15710 - RNA, 20 nt, synthetic construct
  source 1..20: mol_type = other RNA
agaaaggcttcagagagaaa

SEQ ID NO: 15711 - RNA, 20 nt, synthetic construct
  source 1..20: mol_type = other RNA
agaaagtgttttttggaatg

SEQ ID NO: 15712 - RNA, 20 nt, synthetic construct
  source 1..20: mol_type = other RNA
agaaatgagcaactaactta

SEQ ID NO: 15713 - RNA, 20 nt, synthetic construct
  source 1..20: mol_type = other RNA
agaaatgcatacttaattca

SEQ ID NO: 15714 - RNA, 20 nt, synthetic construct
  source 1..20: mol_type = other RNA
agaacacagagacacagaac

SEQ ID NO: 15715 - RNA, 20 nt, synthetic construct
  source 1..20: mol_type = other RNA
agaacacagtggagaaaagg

SEQ ID NO: 15716 - RNA, 20 nt, synthetic construct
  source 1..20: mol_type = other RNA
agaactaaagtacagtttga

SEQ ID NO: 15717 - RNA, 20 nt, synthetic construct
  source 1..20: mol_type = other RNA
agaagaaaacagttccacgt

SEQ ID NO: 15718 - RNA, 20 nt, synthetic construct
  source 1..20: mol_type = other RNA
agaaggttacattcgtgcaa

SEQ ID NO: 15719 - RNA, 20 nt, synthetic construct
  source 1..20: mol_type = other RNA
agaagtctaggtctgcttcc

SEQ ID NO: 15720 - RNA, 20 nt, synthetic construct
  source 1..20: mol_type = other RNA
agaattgaatcttaaatacc

SEQ ID NO: 15721 - RNA, 20 nt, synthetic construct
  source 1..20: mol_type = other RNA
agaattgcttgagcccagta

SEQ ID NO: 15722 - RNA, 20 nt, synthetic construct
  source 1..20: mol_type = other RNA
agacacagaacacagtggag

SEQ ID NO: 15723 - RNA, 20 nt, synthetic construct
  source 1..20: mol_type = other RNA
agacatataaggtgatgcaa

SEQ ID NO: 15724 - RNA, 20 nt, synthetic construct
  source 1..20: mol_type = other RNA
agacatttcactcccttttc

SEQ ID NO: 15725 - RNA, 20 nt, synthetic construct
  source 1..20: mol_type = other RNA
agaccagcatgggcaataca

SEQ ID NO: 15726 - RNA, 20 nt, synthetic construct
  source 1..20: mol_type = other RNA
agacctagacttcttaactc

SEQ ID NO: 15727 - RNA, 20 nt, synthetic construct
  source 1..20: mol_type = other RNA
agacttcttaactctatata

SEQ ID NO: 15728 - RNA, 20 nt, synthetic construct
  source 1..20: mol_type = other RNA
agagaaagtgttttttggaa

SEQ ID NO: 15729 - RNA, 20 nt, synthetic construct
  source 1..20: mol_type = other RNA
agagacacagaacacagtgg

SEQ ID NO: 15730 - RNA, 20 nt, synthetic construct
  source 1..20: mol_type = other RNA
agagagaaagtgttttttgg

SEQ ID NO: 15731 - RNA, 20 nt, synthetic construct
  source 1..20: mol_type = other RNA
agagatttacaagtcaaaaa

SEQ ID NO: 15732 - RNA, 20 nt, synthetic construct
  source 1..20: mol_type = other RNA
agagccgtaacaccacctga

SEQ ID NO: 15733 - RNA, 20 nt, synthetic construct
  source 1..20: mol_type = other RNA
agagcctagaacacagagac

SEQ ID NO: 15734 - RNA, 20 nt, synthetic construct
  source 1..20: mol_type = other RNA
agaggaacacagcattgaga

SEQ ID NO: 15735 - RNA, 20 nt, synthetic construct
  source 1..20: mol_type = other RNA
agaggagattaataacattt

SEQ ID NO: 15736 - RNA, 20 nt, synthetic construct
  source 1..20: mol_type = other RNA
agagtaccagaggaacacag

SEQ ID NO: 15737 - RNA, 20 nt, synthetic construct
  source 1..20: mol_type = other RNA
agagttaagaagtctaggtc

SEQ ID NO: 15738 - RNA, 20 nt, synthetic construct
  source 1..20: mol_type = other RNA
agatcaatgctaaatgaaat

SEQ ID NO: 15739 - RNA, 20 nt, synthetic construct
  source 1..20: mol_type = other RNA
agatgaccacatatccattg

SEQ ID NO: 15740 - RNA, 20 nt, synthetic construct
  source 1..20: mol_type = other RNA
agatgatgtcttaatgtatt

SEQ ID NO: 15741 - RNA, 20 nt, synthetic construct
  source 1..20: mol_type = other RNA
agattcaattctagtttggt

SEQ ID NO: 15742 - RNA, 20 nt, synthetic construct
  source 1..20: mol_type = other RNA
agatttacaagtcaaaaata

SEQ ID NO: 15743 - RNA, 20 nt, synthetic construct
  source 1..20: mol_type = other RNA
agcaaagttaaatacaattt

SEQ ID NO: 15744 - RNA, 20 nt, synthetic construct
  source 1..20: mol_type = other RNA
agcaacgtggaactgttttc

SEQ ID NO: 15745 - RNA, 20 nt, synthetic construct
  source 1..20: mol_type = other RNA
agcaactaacttaataggta

SEQ ID NO: 15746 - RNA, 20 nt, synthetic construct
  source 1..20: mol_type = other RNA
agcacatggtaaagagccta

SEQ ID NO: 15747 - RNA, 20 nt, synthetic construct
  source 1..20: mol_type = other RNA
agcagacctagacttcttaa

SEQ ID NO: 15748 - RNA, 20 nt, synthetic construct
  source 1..20: mol_type = other RNA
agcagcttgcccatcataag

SEQ ID NO: 15749 - RNA, 20 nt, synthetic construct
  source 1..20: mol_type = other RNA
agcatataattatacattga

SEQ ID NO: 15750 - RNA, 20 nt, synthetic construct
  source 1..20: mol_type = other RNA
agcatgggcaatacattaag

SEQ ID NO: 15751 - RNA, 20 nt, synthetic construct
  source 1..20: mol_type = other RNA
agcattgaatgtgtagttta

SEQ ID NO: 15752 - RNA, 20 nt, synthetic construct
  source 1..20: mol_type = other RNA
agcattgagagccgtaacac

SEQ ID NO: 15753 - RNA, 20 nt, synthetic construct
  source 1..20: mol_type = other RNA
agcattgatctaactcaatg

SEQ ID NO: 15754 - RNA, 20 nt, synthetic construct
  source 1..20: mol_type = other RNA
agcccagtatttccagacca

SEQ ID NO: 15755 - RNA, 20 nt, synthetic construct
  source 1..20: mol_type = other RNA
agccgtaacaccacctgagg

SEQ ID NO: 15756 - RNA, 20 nt, synthetic construct
  source 1..20: mol_type = other RNA
agccgtgttaacttgcacga

SEQ ID NO: 15757 - RNA, 20 nt, synthetic construct
  source 1..20: mol_type = other RNA
agcctagaacacagagacac

SEQ ID NO: 15758 - RNA, 20 nt, synthetic construct
  source 1..20: mol_type = other RNA
agcctttctccactccctca

SEQ ID NO: 15759 - RNA, 20 nt, synthetic construct
  source 1..20: mol_type = other RNA
agctaacaaacttcagaaaa

SEQ ID NO: 15760 - RNA, 20 nt, synthetic construct
  source 1..20: mol_type = other RNA
agctgcttgtgacattgaag

SEQ ID NO: 15761 - RNA, 20 nt, synthetic construct
  source 1..20: mol_type = other RNA
agcttagtaacaattttgat

SEQ ID NO: 15762 - RNA, 20 nt, synthetic construct
  source 1..20: mol_type = other RNA
agcttgcccatcataagttt

SEQ ID NO: 15763 - RNA, 20 nt, synthetic construct
  source 1..20: mol_type = other RNA
agcttttaaaaacaggtagt

SEQ ID NO: 15764 - RNA, 20 nt, synthetic construct
  source 1..20: mol_type = other RNA
aggaacaatggatatgtggt

SEQ ID NO: 15765 - RNA, 20 nt, synthetic construct
  source 1..20: mol_type = other RNA
aggaacacagcattgagagc

SEQ ID NO: 15766 - RNA, 20 nt, synthetic construct
  source 1..20: mol_type = other RNA
aggaccaaactagaattgaa

SEQ ID NO: 15767 - RNA, 20 nt, synthetic construct
  source 1..20: mol_type = other RNA
aggagattaataacattttt

SEQ ID NO: 15768 - RNA, 20 nt, synthetic construct
  source 1..20: mol_type = other RNA
aggagcatataattatacat

SEQ ID NO: 15769 - RNA, 20 nt, synthetic construct
  source 1..20: mol_type = other RNA
aggatggttaagacatataa

SEQ ID NO: 15770 - RNA, 20 nt, synthetic construct
  source 1..20: mol_type = other RNA
aggccaaggtaaaagaattg

SEQ ID NO: 15771 - RNA, 20 nt, synthetic construct
  source 1..20: mol_type = other RNA
aggctctttaccatgtgctc

SEQ ID NO: 15772 - RNA, 20 nt, synthetic construct
  source 1..20: mol_type = other RNA
aggcttcagagagaaagtgt

SEQ ID NO: 15773 - RNA, 20 nt, synthetic construct
  source 1..20: mol_type = other RNA
agggagtgaaatgtctttaa

SEQ ID NO: 15774 - RNA, 20 nt, synthetic construct
  source 1..20: mol_type = other RNA
agggagtggagaaaggcttc

SEQ ID NO: 15775 - RNA, 20 nt, synthetic construct
  source 1..20: mol_type = other RNA
aggggaaaaaagtaatgaat

SEQ ID NO: 15776 - RNA, 20 nt, synthetic construct
  source 1..20: mol_type = other RNA
aggtaaaagaattgcttgag

SEQ ID NO: 15777 - RNA, 20 nt, synthetic construct
  source 1..20: mol_type = other RNA
aggtaaggttggtaggtgaa

SEQ ID NO: 15778 - RNA, 20 nt, synthetic construct
  source 1..20: mol_type = other RNA
aggtaatttgaaattgtatt

SEQ ID NO: 15779 - RNA, 20 nt, synthetic construct
  source 1..20: mol_type = other RNA
aggtagtcaccatagcattg

SEQ ID NO: 15780 - RNA, 20 nt, synthetic construct
  source 1..20: mol_type = other RNA
aggtatttaagattcaattc

SEQ ID NO: 15781 - RNA, 20 nt, synthetic construct
  source 1..20: mol_type = other RNA
aggtctgcttccagaagaaa

SEQ ID NO: 15782 - RNA, 20 nt, synthetic construct
  source 1..20: mol_type = other RNA
aggtgaacatagttaatcat

SEQ ID NO: 15783 - RNA, 20 nt, synthetic construct
  source 1..20: mol_type = other RNA
aggtggtgttacggctctca

SEQ ID NO: 15784 - RNA, 20 nt, synthetic construct
  source 1..20: mol_type = other RNA
aggttacattcgtgcaagtt

SEQ ID NO: 15785 - RNA, 20 nt, synthetic construct
  source 1..20: mol_type = other RNA
aggttggtaggtgaacatag

SEQ ID NO: 15786 - RNA, 20 nt, synthetic construct
  source 1..20: mol_type = other RNA
agtaagtgtcattaaagaca

SEQ ID NO: 15787 - RNA, 20 nt, synthetic construct
  source 1..20: mol_type = other RNA
agtaatgaattaagtatgca

SEQ ID NO: 15788 - RNA, 20 nt, synthetic construct
  source 1..20: mol_type = other RNA
agtacagtttgagaaatgca

SEQ ID NO: 15789 - RNA, 20 nt, synthetic construct
  source 1..20: mol_type = other RNA
agtaccagaggaacacagca

SEQ ID NO: 15790 - RNA, 20 nt, synthetic construct
  source 1..20: mol_type = other RNA
agtatgcatttctcaaactg

SEQ ID NO: 15791 - RNA, 20 nt, synthetic construct
  source 1..20: mol_type = other RNA
agtatttccagaccagcatg

SEQ ID NO: 15792 - RNA, 20 nt, synthetic construct
  source 1..20: mol_type = other RNA
agtcaccatagcattgaatg

SEQ ID NO: 15793 - RNA, 20 nt, synthetic construct
  source 1..20: mol_type = other RNA
agtctaggtctgcttccaga

SEQ ID NO: 15794 - RNA, 20 nt, synthetic construct
  source 1..20: mol_type = other RNA
agtgaaatgtctttaatgac

SEQ ID NO: 15795 - RNA, 20 nt, synthetic construct
  source 1..20: mol_type = other RNA
agtgacaaaaaatgaggagc

SEQ ID NO: 15796 - RNA, 20 nt, synthetic construct
  source 1..20: mol_type = other RNA
agtgatccattccaaaaaac

SEQ ID NO: 15797 - RNA, 20 nt, synthetic construct
  source 1..20: mol_type = other RNA
agtggagaaaagggagtgaa

SEQ ID NO: 15798 - RNA, 20 nt, synthetic construct
  source 1..20: mol_type = other RNA
agtggagaaaggcttcagag

SEQ ID NO: 15799 - RNA, 20 nt, synthetic construct
  source 1..20: mol_type = other RNA
agtgtcattaaagacatttc

SEQ ID NO: 15800 - RNA, 20 nt, synthetic construct
  source 1..20: mol_type = other RNA
agtgttttttggaatggatc

SEQ ID NO: 15801 - RNA, 20 nt, synthetic construct
  source 1..20: mol_type = other RNA
agttaacacggcttaatgat

SEQ ID NO: 15802 - RNA, 20 nt, synthetic construct
  source 1..20: mol_type = other RNA
agttaagaagtctaggtctg

SEQ ID NO: 15803 - RNA, 20 nt, synthetic construct
  source 1..20: mol_type = other RNA
agttaatcattaagccgtgt

SEQ ID NO: 15804 - RNA, 20 nt, synthetic construct
  source 1..20: mol_type = other RNA
agttagatcaatgctaaatg

SEQ ID NO: 15805 - RNA, 20 nt, synthetic construct
  source 1..20: mol_type = other RNA
agttagttgctcatttcttt

SEQ ID NO: 15806 - RNA, 20 nt, synthetic construct
  source 1..20: mol_type = other RNA
agttccacgttgcttgaaat

SEQ ID NO: 15807 - RNA, 20 nt, synthetic construct
  source 1..20: mol_type = other RNA
agttcttttggaaacagtga

SEQ ID NO: 15808 - RNA, 20 nt, synthetic construct
  source 1..20: mol_type = other RNA
agttgaggggaaaaaagtaa

SEQ ID NO: 15809 - RNA, 20 nt, synthetic construct
  source 1..20: mol_type = other RNA
agttgctcatttctttgatt

SEQ ID NO: 15810 - RNA, 20 nt, synthetic construct
  source 1..20: mol_type = other RNA
agtttataatacagcaaagt

SEQ ID NO: 15811 - RNA, 20 nt, synthetic construct
  source 1..20: mol_type = other RNA
agtttatttttgacttgtaa

SEQ ID NO: 15812 - RNA, 20 nt, synthetic construct
  source 1..20: mol_type = other RNA
agtttgagaaatgcatactt

SEQ ID NO: 15813 - RNA, 20 nt, synthetic construct
  source 1..20: mol_type = other RNA
agtttggtcctagatgacca

SEQ ID NO: 15814 - RNA, 20 nt, synthetic construct
  source 1..20: mol_type = other RNA
agtttgttagcttagtaaca

SEQ ID NO: 15815 - RNA, 20 nt, synthetic construct
  source 1..20: mol_type = other RNA
agtttttctgaagtttgtta

SEQ ID NO: 15816 - RNA, 20 nt, synthetic construct
  source 1..20: mol_type = other RNA
ataaactacacattcaatgc

SEQ ID NO: 15817 - RNA, 20 nt, synthetic construct
  source 1..20: mol_type = other RNA
ataaacttttttgttgggta

SEQ ID NO: 15818 - RNA, 20 nt, synthetic construct
  source 1..20: mol_type = other RNA
ataaatttacccaacaaaaa

SEQ ID NO: 15819 - RNA, 20 nt, synthetic construct
  source 1..20: mol_type = other RNA
ataagtttttctgaagtttg

SEQ ID NO: 15820 - RNA, 20 nt, synthetic construct
  source 1..20: mol_type = other RNA
ataataaatttacccaacaa

SEQ ID NO: 15821 - RNA, 20 nt, synthetic construct
  source 1..20: mol_type = other RNA
ataatacagcaaagttaaat

SEQ ID NO: 15822 - RNA, 20 nt, synthetic construct
  source 1..20: mol_type = other RNA
ataattatatgctcctcatt

SEQ ID NO: 15823 - RNA, 20 nt, synthetic construct
  source 1..20: mol_type = other RNA
atacaaggatggttaagaca

SEQ ID NO: 15824 - RNA, 20 nt, synthetic construct
  source 1..20: mol_type = other RNA
atacaatttcaaattaccta

SEQ ID NO: 15825 - RNA, 20 nt, synthetic construct
  source 1..20: mol_type = other RNA
atacagagtaccagaggaac

SEQ ID NO: 15826 - RNA, 20 nt, synthetic construct
  source 1..20: mol_type = other RNA
atacagcaaagttaaataca

SEQ ID NO: 15827 - RNA, 20 nt, synthetic construct
  source 1..20: mol_type = other RNA
atacattaagacatcatctt

SEQ ID NO: 15828 - RNA, 20 nt, synthetic construct
  source 1..20: mol_type = other RNA
atacattgatttatacagag

SEQ ID NO: 15829 - RNA, 20 nt, synthetic construct
  source 1..20: mol_type = other RNA
atacatttaacaaaaagagg

SEQ ID NO: 15830 - RNA, 20 nt, synthetic construct
  source 1..20: mol_type = other RNA
ataccaatatttgcccagaa

SEQ ID NO: 15831 - RNA, 20 nt, synthetic construct
  source 1..20: mol_type = other RNA
ataccttcaatgtcacaagc

SEQ ID NO: 15832 - RNA, 20 nt, synthetic construct
  source 1..20: mol_type = other RNA
atactgggctcaagcaattc

SEQ ID NO: 15833 - RNA, 20 nt, synthetic construct
  source 1..20: mol_type = other RNA
atagagttaagaagtctagg

SEQ ID NO: 15834 - RNA, 20 nt, synthetic construct
  source 1..20: mol_type = other RNA
atagcattgaatgtgtagtt

SEQ ID NO: 15835 - RNA, 20 nt, synthetic construct
  source 1..20: mol_type = other RNA
ataggtaatttgaaattgta

SEQ ID NO: 15836 - RNA, 20 nt, synthetic construct
  source 1..20: mol_type = other RNA
atagtaagtgtcattaaaga

SEQ ID NO: 15837 - RNA, 20 nt, synthetic construct
  source 1..20: mol_type = other RNA
atagtgacaaaaaatgagga

SEQ ID NO: 15838 - RNA, 20 nt, synthetic construct
  source 1..20: mol_type = other RNA
atagttaatcattaagccgt

SEQ ID NO: 15839 - RNA, 20 nt, synthetic construct
  source 1..20: mol_type = other RNA
atataaggtgatgcaaaaaa

SEQ ID NO: 15840 - RNA, 20 nt, synthetic construct
  source 1..20: mol_type = other RNA
atatacaaggatggttaaga

SEQ ID NO: 15841 - RNA, 20 nt, synthetic construct
  source 1..20: mol_type = other RNA
atataccaatatttgcccag

SEQ ID NO: 15842 - RNA, 20 nt, synthetic construct
  source 1..20: mol_type = other RNA
atatagagttaagaagtcta

SEQ ID NO: 15843 - RNA, 20 nt, synthetic construct
  source 1..20: mol_type = other RNA
atatagtaagtgtcattaaa

SEQ ID NO: 15844 - RNA, 20 nt, synthetic construct
  source 1..20: mol_type = other RNA
atatataccaatatttgccc

SEQ ID NO: 15845 - RNA, 20 nt, synthetic construct
  source 1..20: mol_type = other RNA
atatatagagttaagaagtc

SEQ ID NO: 15846 - RNA, 20 nt, synthetic construct
  source 1..20: mol_type = other RNA
atatatagtaagtgtcatta

SEQ ID NO: 15847 - RNA, 20 nt, synthetic construct
  source 1..20: mol_type = other RNA
atatatgggattttgtgaca

SEQ ID NO: 15848 - RNA, 20 nt, synthetic construct
  source 1..20: mol_type = other RNA
atatccattgttccttcaac

SEQ ID NO: 15849 - RNA, 20 nt, synthetic construct
  source 1..20: mol_type = other RNA
atatgctcctcattttttgt

SEQ ID NO: 15850 - RNA, 20 nt, synthetic construct
  source 1..20: mol_type = other RNA
atatgggattttgtgacaat

SEQ ID NO: 15851 - RNA, 20 nt, synthetic construct
  source 1..20: mol_type = other RNA
atatgtcttaaccatccttg

SEQ ID NO: 15852 - RNA, 20 nt, synthetic construct
  source 1..20: mol_type = other RNA
atatgtggtcatctaggacc

SEQ ID NO: 15853 - RNA, 20 nt, synthetic construct
  source 1..20: mol_type = other RNA
atattaacaattatagtgac

SEQ ID NO: 15854 - RNA, 20 nt, synthetic construct
  source 1..20: mol_type = other RNA
atattggtatatatagagtt

SEQ ID NO: 15855 - RNA, 20 nt, synthetic construct
  source 1..20: mol_type = other RNA
atattgtcacaaaatcccat

SEQ ID NO: 15856 - RNA, 20 nt, synthetic construct
  source 1..20: mol_type = other RNA
atatttgcccagaaaaggta

SEQ ID NO: 15857 - RNA, 20 nt, synthetic construct
  source 1..20: mol_type = other RNA
atcaaaattgttactaagct

SEQ ID NO: 15858 - RNA, 20 nt, synthetic construct
  source 1..20: mol_type = other RNA
atcaaagaaatgagcaacta

SEQ ID NO: 15859 - RNA, 20 nt, synthetic construct
  source 1..20: mol_type = other RNA
atcaatgctaaatgaaatca

SEQ ID NO: 15860 - RNA, 20 nt, synthetic construct
  source 1..20: mol_type = other RNA
atcaatgtataattatatgc

SEQ ID NO: 15861 - RNA, 20 nt, synthetic construct
  source 1..20: mol_type = other RNA
atcaccttatatgtcttaac

SEQ ID NO: 15862 - RNA, 20 nt, synthetic construct
  source 1..20: mol_type = other RNA
atcactgtttccaaaagaac

SEQ ID NO: 15863 - RNA, 20 nt, synthetic construct
  source 1..20: mol_type = other RNA
atcataagtttttctgaagt

SEQ ID NO: 15864 - RNA, 20 nt, synthetic construct
  source 1..20: mol_type = other RNA
atcattaagccgtgttaact

SEQ ID NO: 15865 - RNA, 20 nt, synthetic construct
  source 1..20: mol_type = other RNA
atccattccaaaaaacactt

SEQ ID NO: 15866 - RNA, 20 nt, synthetic construct
  source 1..20: mol_type = other RNA
atccattgttccttcaacga

SEQ ID NO: 15867 - RNA, 20 nt, synthetic construct
  source 1..20: mol_type = other RNA
atcccatatatagtaagtgt

SEQ ID NO: 15868 - RNA, 20 nt, synthetic construct
  source 1..20: mol_type = other RNA
atccttgtatattgtcacaa

SEQ ID NO: 15869 - RNA, 20 nt, synthetic construct
  source 1..20: mol_type = other RNA
atctaactcaatgtggaaga

SEQ ID NO: 15870 - RNA, 20 nt, synthetic construct
  source 1..20: mol_type = other RNA
atctaggaccaaactagaat

SEQ ID NO: 15871 - RNA, 20 nt, synthetic construct
  source 1..20: mol_type = other RNA
atctcctctttttgttaaat

SEQ ID NO: 15872 - RNA, 20 nt, synthetic construct
  source 1..20: mol_type = other RNA
atcttaaataccttcaatgt

SEQ ID NO: 15873 - RNA, 20 nt, synthetic construct
  source 1..20: mol_type = other RNA
atcttgattttcaatttcaa

SEQ ID NO: 15874 - RNA, 20 nt, synthetic construct
  source 1..20: mol_type = other RNA
atgaaatcaaagaaatgagc

SEQ ID NO: 15875 - RNA, 20 nt, synthetic construct
  source 1..20: mol_type = other RNA
atgaattaagtatgcatttc

SEQ ID NO: 15876 - RNA, 20 nt, synthetic construct
  source 1..20: mol_type = other RNA
atgacacttactatatatgg

SEQ ID NO: 15877 - RNA, 20 nt, synthetic construct
  source 1..20: mol_type = other RNA
atgaccacatatccattgtt

SEQ ID NO: 15878 - RNA, 20 nt, synthetic construct
  source 1..20: mol_type = other RNA
atgagcaactaacttaatag

SEQ ID NO: 15879 - RNA, 20 nt, synthetic construct
  source 1..20: mol_type = other RNA
atgaggagcatataattata

SEQ ID NO: 15880 - RNA, 20 nt, synthetic construct
  source 1..20: mol_type = other RNA
atgatgggcaagctgcttgt

SEQ ID NO: 15881 - RNA, 20 nt, synthetic construct
  source 1..20: mol_type = other RNA
atgatgtcttaatgtattgc

SEQ ID NO: 15882 - RNA, 20 nt, synthetic construct
  source 1..20: mol_type = other RNA
atgattaactatgttcacct

SEQ ID NO: 15883 - RNA, 20 nt, synthetic construct
  source 1..20: mol_type = other RNA
atgattttaagagatttaca

SEQ ID NO: 15884 - RNA, 20 nt, synthetic construct
  source 1..20: mol_type = other RNA
atgcatacttaattcattac

SEQ ID NO: 15885 - RNA, 20 nt, synthetic construct
  source 1..20: mol_type = other RNA
atgcatttctcaaactgtac

SEQ ID NO: 15886 - RNA, 20 nt, synthetic construct
  source 1..20: mol_type = other RNA
atgctaaatgaaatcaaaga

SEQ ID NO: 15887 - RNA, 20 nt, synthetic construct
  source 1..20: mol_type = other RNA
atgctatggtgactacctgt

SEQ ID NO: 15888 - RNA, 20 nt, synthetic construct
  source 1..20: mol_type = other RNA
atgctcctcattttttgtca

SEQ ID NO: 15889 - RNA, 20 nt, synthetic construct
  source 1..20: mol_type = other RNA
atgctggtctggaaatactg

SEQ ID NO: 15890 - RNA, 20 nt, synthetic construct
  source 1..20: mol_type = other RNA
atgctgtgttcctctggtac

SEQ ID NO: 15891 - RNA, 20 nt, synthetic construct
  source 1..20: mol_type = other RNA
atggatatgtggtcatctag

SEQ ID NO: 15892 - RNA, 20 nt, synthetic construct
  source 1..20: mol_type = other RNA
atggatcactgtttccaaaa

SEQ ID NO: 15893 - RNA, 20 nt, synthetic construct
  source 1..20: mol_type = other RNA
atgggattttgtgacaatat

SEQ ID NO: 15894 - RNA, 20 nt, synthetic construct
  source 1..20: mol_type = other RNA
atgggcaagctgcttgtgac

SEQ ID NO: 15895 - RNA, 20 nt, synthetic construct
  source 1..20: mol_type = other RNA
atgggcaatacattaagaca

SEQ ID NO: 15896 - RNA, 20 nt, synthetic construct
  source 1..20: mol_type = other RNA
atggtaaagagcctagaaca

SEQ ID NO: 15897 - RNA, 20 nt, synthetic construct
  source 1..20: mol_type = other RNA
atggtgactacctgttttta

SEQ ID NO: 15898 - RNA, 20 nt, synthetic construct
  source 1..20: mol_type = other RNA
atggttaagacatataaggt

SEQ ID NO: 15899 - RNA, 20 nt, synthetic construct
  source 1..20: mol_type = other RNA
atgtaaccttcttccacatt

SEQ ID NO: 15900 - RNA, 20 nt, synthetic construct
  source 1..20: mol_type = other RNA
atgtataattatatgctcct

SEQ ID NO: 15901 - RNA, 20 nt, synthetic construct
  source 1..20: mol_type = other RNA
atgtattgcccatgctggtc

SEQ ID NO: 15902 - RNA, 20 nt, synthetic construct
  source 1..20: mol_type = other RNA
atgtcacaagcagcttgccc

SEQ ID NO: 15903 - RNA, 20 nt, synthetic construct
  source 1..20: mol_type = other RNA
atgtcttaaccatccttgta

SEQ ID NO: 15904 - RNA, 20 nt, synthetic construct
  source 1..20: mol_type = other RNA
atgtcttaatgtattgccca

SEQ ID NO: 15905 - RNA, 20 nt, synthetic construct
  source 1..20: mol_type = other RNA
atgtctttaatgacacttac

SEQ ID NO: 15906 - RNA, 20 nt, synthetic construct
  source 1..20: mol_type = other RNA
atgtgctcgttgaaggaaca

SEQ ID NO: 15907 - RNA, 20 nt, synthetic construct
  source 1..20: mol_type = other RNA
atgtggaagaaggttacatt

SEQ ID NO: 15908 - RNA, 20 nt, synthetic construct
  source 1..20: mol_type = other RNA
atgtggtcatctaggaccaa

SEQ ID NO: 15909 - RNA, 20 nt, synthetic construct
  source 1..20: mol_type = other RNA
atgtgtagtttataatacag

SEQ ID NO: 15910 - RNA, 20 nt, synthetic construct
  source 1..20: mol_type = other RNA
atgttattaatctcctcttt

SEQ ID NO: 15911 - RNA, 20 nt, synthetic construct
  source 1..20: mol_type = other RNA
atgttcacctaccaacctta

SEQ ID NO: 15912 - RNA, 20 nt, synthetic construct
  source 1..20: mol_type = other RNA
attaaagacatttcactccc

SEQ ID NO: 15913 - RNA, 20 nt, synthetic construct
  source 1..20: mol_type = other RNA
attaaagttgaggggaaaaa

SEQ ID NO: 15914 - RNA, 20 nt, synthetic construct
  source 1..20: mol_type = other RNA
attaacaattatagtgacaa

SEQ ID NO: 15915 - RNA, 20 nt, synthetic construct
  source 1..20: mol_type = other RNA
attaactatgttcacctacc

SEQ ID NO: 15916 - RNA, 20 nt, synthetic construct
  source 1..20: mol_type = other RNA
attaagacatcatctttaaa

SEQ ID NO: 15917 - RNA, 20 nt, synthetic construct
  source 1..20: mol_type = other RNA
attaagccgtgttaacttgc

SEQ ID NO: 15918 - RNA, 20 nt, synthetic construct
  source 1..20: mol_type = other RNA
attaagtatgcatttctcaa

SEQ ID NO: 15919 - RNA, 20 nt, synthetic construct
  source 1..20: mol_type = other RNA
attaagttagttgctcattt

SEQ ID NO: 15920 - RNA, 20 nt, synthetic construct
  source 1..20: mol_type = other RNA
attaatctcctctttttgtt

SEQ ID NO: 15921 - RNA, 20 nt, synthetic construct
  source 1..20: mol_type = other RNA
attacctattaagttagttg

SEQ ID NO: 15922 - RNA, 20 nt, synthetic construct
  source 1..20: mol_type = other RNA
attacttttttcccctcaac

SEQ ID NO: 15923 - RNA, 20 nt, synthetic construct
  source 1..20: mol_type = other RNA
attagcttttaaaaacaggt

SEQ ID NO: 15924 - RNA, 20 nt, synthetic construct
  source 1..20: mol_type = other RNA
attataaactacacattcaa

SEQ ID NO: 15925 - RNA, 20 nt, synthetic construct
  source 1..20: mol_type = other RNA
attatagtgacaaaaaatga

SEQ ID NO: 15926 - RNA, 20 nt, synthetic construct
  source 1..20: mol_type = other RNA
attatatgctcctcattttt

SEQ ID NO: 15927 - RNA, 20 nt, synthetic construct
  source 1..20: mol_type = other RNA
attattaaagttgaggggaa

SEQ ID NO: 15928 - RNA, 20 nt, synthetic construct
  source 1..20: mol_type = other RNA
attcaatgctatggtgacta

SEQ ID NO: 15929 - RNA, 20 nt, synthetic construct
  source 1..20: mol_type = other RNA
attcaattctagtttggtcc

SEQ ID NO: 15930 - RNA, 20 nt, synthetic construct
  source 1..20: mol_type = other RNA
attcattacttttttcccct

SEQ ID NO: 15931 - RNA, 20 nt, synthetic construct
  source 1..20: mol_type = other RNA
attccaaaaaacactttctc

SEQ ID NO: 15932 - RNA, 20 nt, synthetic construct
  source 1..20: mol_type = other RNA
attcgtgcaagttaacacgg

SEQ ID NO: 15933 - RNA, 20 nt, synthetic construct
  source 1..20: mol_type = other RNA
attctagtttggtcctagat

SEQ ID NO: 15934 - RNA, 20 nt, synthetic construct
  source 1..20: mol_type = other RNA
attgaaggtatttaagattc

SEQ ID NO: 15935 - RNA, 20 nt, synthetic construct
  source 1..20: mol_type = other RNA
attgaatcttaaataccttc

SEQ ID NO: 15936 - RNA, 20 nt, synthetic construct
  source 1..20: mol_type = other RNA
attgaatgtgtagtttataa

SEQ ID NO: 15937 - RNA, 20 nt, synthetic construct
  source 1..20: mol_type = other RNA
attgagagccgtaacaccac

SEQ ID NO: 15938 - RNA, 20 nt, synthetic construct
  source 1..20: mol_type = other RNA
attgagttagatcaatgcta

SEQ ID NO: 15939 - RNA, 20 nt, synthetic construct
  source 1..20: mol_type = other RNA
attgatctaactcaatgtgg

SEQ ID NO: 15940 - RNA, 20 nt, synthetic construct
  source 1..20: mol_type = other RNA
attgatttatacagagtacc

SEQ ID NO: 15941 - RNA, 20 nt, synthetic construct
  source 1..20: mol_type = other RNA
attgcccatgctggtctgga

SEQ ID NO: 15942 - RNA, 20 nt, synthetic construct
  source 1..20: mol_type = other RNA
attgcttgagcccagtattt

SEQ ID NO: 15943 - RNA, 20 nt, synthetic construct
  source 1..20: mol_type = other RNA
attggtatatatagagttaa

SEQ ID NO: 15944 - RNA, 20 nt, synthetic construct
  source 1..20: mol_type = other RNA
attgtatttaactttgctgt

SEQ ID NO: 15945 - RNA, 20 nt, synthetic construct
  source 1..20: mol_type = other RNA
attgtcacaaaatcccatat

SEQ ID NO: 15946 - RNA, 20 nt, synthetic construct
  source 1..20: mol_type = other RNA
attgttactaagctaacaaa

SEQ ID NO: 15947 - RNA, 20 nt, synthetic construct
  source 1..20: mol_type = other RNA
attgttccttcaacgagcac

SEQ ID NO: 15948 - RNA, 20 nt, synthetic construct
  source 1..20: mol_type = other RNA
atttaacaaaaagaggagat

SEQ ID NO: 15949 - RNA, 20 nt, synthetic construct
  source 1..20: mol_type = other RNA
atttaactttgctgtattat

SEQ ID NO: 15950 - RNA, 20 nt, synthetic construct
  source 1..20: mol_type = other RNA
atttaagattcaattctagt

SEQ ID NO: 15951 - RNA, 20 nt, synthetic construct
  source 1..20: mol_type = other RNA
atttacccaacaaaaaagtt

SEQ ID NO: 15952 - RNA, 20 nt, synthetic construct
  source 1..20: mol_type = other RNA
atttagcattgatctaactc

SEQ ID NO: 15953 - RNA, 20 nt, synthetic construct
  source 1..20: mol_type = other RNA
atttatacagagtaccagag

SEQ ID NO: 15954 - RNA, 20 nt, synthetic construct
  source 1..20: mol_type = other RNA
atttattattaaagttgagg

SEQ ID NO: 15955 - RNA, 20 nt, synthetic construct
  source 1..20: mol_type = other RNA
atttcaaattacctattaag

SEQ ID NO: 15956 - RNA, 20 nt, synthetic construct
  source 1..20: mol_type = other RNA
atttcaagcaacgtggaact

SEQ ID NO: 15957 - RNA, 20 nt, synthetic construct
  source 1..20: mol_type = other RNA
atttcactcccttttctcca

SEQ ID NO: 15958 - RNA, 20 nt, synthetic construct
  source 1..20: mol_type = other RNA
atttcatttagcattgatct

SEQ ID NO: 15959 - RNA, 20 nt, synthetic construct
  source 1..20: mol_type = other RNA
atttccagaccagcatgggc

SEQ ID NO: 15960 - RNA, 20 nt, synthetic construct
  source 1..20: mol_type = other RNA
atttctcaaactgtacttta

SEQ ID NO: 15961 - RNA, 20 nt, synthetic construct
  source 1..20: mol_type = other RNA
atttctttgatttcatttag

SEQ ID NO: 15962 - RNA, 20 nt, synthetic construct
  source 1..20: mol_type = other RNA
atttgcccagaaaaggtaag

SEQ ID NO: 15963 - RNA, 20 nt, synthetic construct
  source 1..20: mol_type = other RNA
attttaagagatttacaagt

SEQ ID NO: 15964 - RNA, 20 nt, synthetic construct
  source 1..20: mol_type = other RNA
attttcaatttcaagcaacg

SEQ ID NO: 15965 - RNA, 20 nt, synthetic construct
  source 1..20: mol_type = other RNA
attttgtgacaatatacaag

SEQ ID NO: 15966 - RNA, 20 nt, synthetic construct
  source 1..20: mol_type = other RNA
atttttgacttgtaaatctc

SEQ ID NO: 15967 - RNA, 20 nt, synthetic construct
  source 1..20: mol_type = other RNA
attttttgtcactataattg

SEQ ID NO: 15968 - RNA, 20 nt, synthetic construct
  source 1..20: mol_type = other RNA
caaaaaacactttctctctg

SEQ ID NO: 15969 - RNA, 20 nt, synthetic construct
  source 1..20: mol_type = other RNA
caaaaaagtttatttttgac

SEQ ID NO: 15970 - RNA, 20 nt, synthetic construct
  source 1..20: mol_type = other RNA
caaaaaatgaggagcatata

SEQ ID NO: 15971 - RNA, 20 nt, synthetic construct
  source 1..20: mol_type = other RNA
caaaaagaggagattaataa

SEQ ID NO: 15972 - RNA, 20 nt, synthetic construct
  source 1..20: mol_type = other RNA
caaaagaactaaagtacagt

SEQ ID NO: 15973 - RNA, 20 nt, synthetic construct
  source 1..20: mol_type = other RNA
caaaatcccatatatagtaa

SEQ ID NO: 15974 - RNA, 20 nt, synthetic construct
  source 1..20: mol_type = other RNA
caaaattgttactaagctaa

SEQ ID NO: 15975 - RNA, 20 nt, synthetic construct
  source 1..20: mol_type = other RNA
caaactagaattgaatctta

SEQ ID NO: 15976 - RNA, 20 nt, synthetic construct
  source 1..20: mol_type = other RNA
caaactgtactttagttctt

SEQ ID NO: 15977 - RNA, 20 nt, synthetic construct
  source 1..20: mol_type = other RNA
caaacttcagaaaaacttat

SEQ ID NO: 15978 - RNA, 20 nt, synthetic construct
  source 1..20: mol_type = other RNA
caaagaaatgagcaactaac

SEQ ID NO: 15979 - RNA, 20 nt, synthetic construct
  source 1..20: mol_type = other RNA
caaagttaaatacaatttca

SEQ ID NO: 15980 - RNA, 20 nt, synthetic construct
  source 1..20: mol_type = other RNA
caaatattggtatatataga

SEQ ID NO: 15981 - RNA, 20 nt, synthetic construct
  source 1..20: mol_type = other RNA
caaattacctattaagttag

SEQ ID NO: 15982 - RNA, 20 nt, synthetic construct
  source 1..20: mol_type = other RNA
caaccttaccttttctgggc

SEQ ID NO: 15983 - RNA, 20 nt, synthetic construct
  source 1..20: mol_type = other RNA
caacgagcacatggtaaaga

SEQ ID NO: 15984 - RNA, 20 nt, synthetic construct
  source 1..20: mol_type = other RNA
caacgtggaactgttttctt

SEQ ID NO: 15985 - RNA, 20 nt, synthetic construct
  source 1..20: mol_type = other RNA
caactaacttaataggtaat

SEQ ID NO: 15986 - RNA, 20 nt, synthetic construct
  source 1..20: mol_type = other RNA
caagcaacgtggaactgttt

SEQ ID NO: 15987 - RNA, 20 nt, synthetic construct
  source 1..20: mol_type = other RNA
caagcaattcttttaccttg

SEQ ID NO: 15988 - RNA, 20 nt, synthetic construct
  source 1..20: mol_type = other RNA
caagcagcttgcccatcata

SEQ ID NO: 15989 - RNA, 20 nt, synthetic construct
  source 1..20: mol_type = other RNA
caagctgcttgtgacattga

SEQ ID NO: 15990 - RNA, 20 nt, synthetic construct
  source 1..20: mol_type = other RNA
caaggatggttaagacatat

SEQ ID NO: 15991 - RNA, 20 nt, synthetic construct
  source 1..20: mol_type = other RNA
caaggtaaaagaattgcttg

SEQ ID NO: 15992 - RNA, 20 nt, synthetic construct
  source 1..20: mol_type = other RNA
caagtcaaaaataaactttt

SEQ ID NO: 15993 - RNA, 20 nt, synthetic construct
  source 1..20: mol_type = other RNA
caagttaacacggcttaatg

SEQ ID NO: 15994 - RNA, 20 nt, synthetic construct
  source 1..20: mol_type = other RNA
caatacattaagacatcatc

SEQ ID NO: 15995 - RNA, 20 nt, synthetic construct
  source 1..20: mol_type = other RNA
caatatacaaggatggttaa

SEQ ID NO: 15996 - RNA, 20 nt, synthetic construct
  source 1..20: mol_type = other RNA
caatatttgcccagaaaagg

SEQ ID NO: 15997 - RNA, 20 nt, synthetic construct
  source 1..20: mol_type = other RNA
caatgctaaatgaaatcaaa

SEQ ID NO: 15998 - RNA, 20 nt, synthetic construct
  source 1..20: mol_type = other RNA
caatgctatggtgactacct

SEQ ID NO: 15999 - RNA, 20 nt, synthetic construct
  source 1..20: mol_type = other RNA
caatgctgtgttcctctggt

SEQ ID NO: 16000 - RNA, 20 nt, synthetic construct
  source 1..20: mol_type = other RNA
caatggatatgtggtcatct

SEQ ID NO: 16001 - RNA, 20 nt, synthetic construct
  source 1..20: mol_type = other RNA
caatgtataattatatgctc

SEQ ID NO: 16002 - RNA, 20 nt, synthetic construct
  source 1..20: mol_type = other RNA
caatgtcacaagcagcttgc

SEQ ID NO: 16003 - RNA, 20 nt, synthetic construct
  source 1..20: mol_type = other RNA
caatgtggaagaaggttaca

SEQ ID NO: 16004 - RNA, 20 nt, synthetic construct
  source 1..20: mol_type = other RNA
caattatagtgacaaaaaat

SEQ ID NO: 16005 - RNA, 20 nt, synthetic construct
  source 1..20: mol_type = other RNA
caattctagtttggtcctag

SEQ ID NO: 16006 - RNA, 20 nt, synthetic construct
  source 1..20: mol_type = other RNA
caatttcaaattacctatta

SEQ ID NO: 16007 - RNA, 20 nt, synthetic construct
  source 1..20: mol_type = other RNA
caatttcaagcaacgtggaa

SEQ ID NO: 16008 - RNA, 20 nt, synthetic construct
  source 1..20: mol_type = other RNA
cacaaaatcccatatatagt

SEQ ID NO: 16009 - RNA, 20 nt, synthetic construct
  source 1..20: mol_type = other RNA
cacaagcagcttgcccatca

SEQ ID NO: 16010 - RNA, 20 nt, synthetic construct
  source 1..20: mol_type = other RNA
cacagaacacagtggagaaa

SEQ ID NO: 16011 - RNA, 20 nt, synthetic construct
  source 1..20: mol_type = other RNA
cacagagacacagaacacag

SEQ ID NO: 16012 - RNA, 20 nt, synthetic construct
  source 1..20: mol_type = other RNA
cacagcattgagagccgtaa

SEQ ID NO: 16013 - RNA, 20 nt, synthetic construct
  source 1..20: mol_type = other RNA
cacagtggagaaaagggagt

SEQ ID NO: 16014 - RNA, 20 nt, synthetic construct
  source 1..20: mol_type = other RNA
cacatatccattgttccttc

SEQ ID NO: 16015 - RNA, 20 nt, synthetic construct
  source 1..20: mol_type = other RNA
cacatggtaaagagcctaga

SEQ ID NO: 16016 - RNA, 20 nt, synthetic construct
  source 1..20: mol_type = other RNA
cacattcaatgctatggtga

SEQ ID NO: 16017 - RNA, 20 nt, synthetic construct
  source 1..20: mol_type = other RNA
cacattgagttagatcaatg

SEQ ID NO: 16018 - RNA, 20 nt, synthetic construct
  source 1..20: mol_type = other RNA
caccacctgagggagtggag

SEQ ID NO: 16019 - RNA, 20 nt, synthetic construct
  source 1..20: mol_type = other RNA
caccatagcattgaatgtgt

SEQ ID NO: 16020 - RNA, 20 nt, synthetic construct
  source 1..20: mol_type = other RNA
cacctaccaaccttaccttt

SEQ ID NO: 16021 - RNA, 20 nt, synthetic construct
  source 1..20: mol_type = other RNA
cacctgagggagtggagaaa

SEQ ID NO: 16022 - RNA, 20 nt, synthetic construct
  source 1..20: mol_type = other RNA
caccttatatgtcttaacca

SEQ ID NO: 16023 - RNA, 20 nt, synthetic construct
  source 1..20: mol_type = other RNA
cacgaatgtaaccttcttcc

SEQ ID NO: 16024 - RNA, 20 nt, synthetic construct
  source 1..20: mol_type = other RNA
cacggcttaatgattaacta

SEQ ID NO: 16025 - RNA, 20 nt, synthetic construct
  source 1..20: mol_type = other RNA
cacgttgcttgaaattgaaa

SEQ ID NO: 16026 - RNA, 20 nt, synthetic construct
  source 1..20: mol_type = other RNA
cactataattgttaatatgt

SEQ ID NO: 16027 - RNA, 20 nt, synthetic construct
  source 1..20: mol_type = other RNA
cactccctcaggtggtgtta

SEQ ID NO: 16028 - RNA, 20 nt, synthetic construct
  source 1..20: mol_type = other RNA
cactcccttttctccactgt

SEQ ID NO: 16029 - RNA, 20 nt, synthetic construct
  source 1..20: mol_type = other RNA
cactgtgttctgtgtctctg

SEQ ID NO: 16030 - RNA, 20 nt, synthetic construct
  source 1..20: mol_type = other RNA
cactgtttccaaaagaacta

SEQ ID NO: 16031 - RNA, 20 nt, synthetic construct
  source 1..20: mol_type = other RNA
cacttactatatatgggatt

SEQ ID NO: 16032 - RNA, 20 nt, synthetic construct
  source 1..20: mol_type = other RNA
cactttctctctgaagcctt

SEQ ID NO: 16033 - RNA, 20 nt, synthetic construct
  source 1..20: mol_type = other RNA
cagaaaaacttatgatgggc

SEQ ID NO: 16034 - RNA, 20 nt, synthetic construct
  source 1..20: mol_type = other RNA
cagaaaaggtaaggttggta

SEQ ID NO: 16035 - RNA, 20 nt, synthetic construct
  source 1..20: mol_type = other RNA
cagaacacagtggagaaaag

SEQ ID NO: 16036 - RNA, 20 nt, synthetic construct
  source 1..20: mol_type = other RNA
cagaagaaaacagttccacg

SEQ ID NO: 16037 - RNA, 20 nt, synthetic construct
  source 1..20: mol_type = other RNA
cagaccagcatgggcaatac

SEQ ID NO: 16038 - RNA, 20 nt, synthetic construct
  source 1..20: mol_type = other RNA
cagacctagacttcttaact

SEQ ID NO: 16039 - RNA, 20 nt, synthetic construct
  source 1..20: mol_type = other RNA
cagagacacagaacacagtg

SEQ ID NO: 16040 - RNA, 20 nt, synthetic construct
  source 1..20: mol_type = other RNA
cagagagaaagtgttttttg

SEQ ID NO: 16041 - RNA, 20 nt, synthetic construct
  source 1..20: mol_type = other RNA
cagaggaacacagcattgag

SEQ ID NO: 16042 - RNA, 20 nt, synthetic construct
  source 1..20: mol_type = other RNA
cagagtaccagaggaacaca

SEQ ID NO: 16043 - RNA, 20 nt, synthetic construct
  source 1..20: mol_type = other RNA
cagcaaagttaaatacaatt

SEQ ID NO: 16044 - RNA, 20 nt, synthetic construct
  source 1..20: mol_type = other RNA
cagcatgggcaatacattaa

SEQ ID NO: 16045 - RNA, 20 nt, synthetic construct
  source 1..20: mol_type = other RNA
cagcattgagagccgtaaca

SEQ ID NO: 16046 - RNA, 20 nt, synthetic construct
  source 1..20: mol_type = other RNA
cagcttgcccatcataagtt

SEQ ID NO: 16047 - RNA, 20 nt, synthetic construct
  source 1..20: mol_type = other RNA
caggtagtcaccatagcatt

SEQ ID NO: 16048 - RNA, 20 nt, synthetic construct
  source 1..20: mol_type = other RNA
caggtggtgttacggctctc

SEQ ID NO: 16049 - RNA, 20 nt, synthetic construct
  source 1..20: mol_type = other RNA
cagtatttccagaccagcat

SEQ ID NO: 16050 - RNA, 20 nt, synthetic construct
  source 1..20: mol_type = other RNA
cagtgatccattccaaaaaa

SEQ ID NO: 16051 - RNA, 20 nt, synthetic construct
  source 1..20: mol_type = other RNA
cagtggagaaaagggagtga

SEQ ID NO: 16052 - RNA, 20 nt, synthetic construct
  source 1..20: mol_type = other RNA
cagttccacgttgcttgaaa

SEQ ID NO: 16053 - RNA, 20 nt, synthetic construct
  source 1..20: mol_type = other RNA
cagtttgagaaatgcatact

SEQ ID NO: 16054 - RNA, 20 nt, synthetic construct
  source 1..20: mol_type = other RNA
cataaaaaagtaaaattagc

SEQ ID NO: 16055 - RNA, 20 nt, synthetic construct
  source 1..20: mol_type = other RNA
cataagtttttctgaagttt

SEQ ID NO: 16056 - RNA, 20 nt, synthetic construct
  source 1..20: mol_type = other RNA
catacttaattcattacttt

SEQ ID NO: 16057 - RNA, 20 nt, synthetic construct
  source 1..20: mol_type = other RNA
catagcattgaatgtgtagt

SEQ ID NO: 16058 - RNA, 20 nt, synthetic construct
  source 1..20: mol_type = other RNA
catagttaatcattaagccg

SEQ ID NO: 16059 - RNA, 20 nt, synthetic construct
  source 1..20: mol_type = other RNA
catataaggtgatgcaaaaa

SEQ ID NO: 16060 - RNA, 20 nt, synthetic construct
  source 1..20: mol_type = other RNA
catatatagtaagtgtcatt

SEQ ID NO: 16061 - RNA, 20 nt, synthetic construct
  source 1..20: mol_type = other RNA
catatccattgttccttcaa

SEQ ID NO: 16062 - RNA, 20 nt, synthetic construct
  source 1..20: mol_type = other RNA
catattaacaattatagtga

SEQ ID NO: 16063 - RNA, 20 nt, synthetic construct
  source 1..20: mol_type = other RNA
catcaccttatatgtcttaa

SEQ ID NO: 16064 - RNA, 20 nt, synthetic construct
  source 1..20: mol_type = other RNA
catcataagtttttctgaag

SEQ ID NO: 16065 - RNA, 20 nt, synthetic construct
  source 1..20: mol_type = other RNA
catccttgtatattgtcaca

SEQ ID NO: 16066 - RNA, 20 nt, synthetic construct
  source 1..20: mol_type = other RNA
catctaggaccaaactagaa

SEQ ID NO: 16067 - RNA, 20 nt, synthetic construct
  source 1..20: mol_type = other RNA
catgctggtctggaaatact

SEQ ID NO: 16068 - RNA, 20 nt, synthetic construct
  source 1..20: mol_type = other RNA
catgggcaatacattaagac

SEQ ID NO: 16069 - RNA, 20 nt, synthetic construct
  source 1..20: mol_type = other RNA
catggtaaagagcctagaac

SEQ ID NO: 16070 - RNA, 20 nt, synthetic construct
  source 1..20: mol_type = other RNA
catgtgctcgttgaaggaac

SEQ ID NO: 16071 - RNA, 20 nt, synthetic construct
  source 1..20: mol_type = other RNA
cattaaagacatttcactcc

SEQ ID NO: 16072 - RNA, 20 nt, synthetic construct
  source 1..20: mol_type = other RNA
cattaagacatcatctttaa

SEQ ID NO: 16073 - RNA, 20 nt, synthetic construct
  source 1..20: mol_type = other RNA
cattaagccgtgttaacttg

SEQ ID NO: 16074 - RNA, 20 nt, synthetic construct
  source 1..20: mol_type = other RNA
cattacttttttcccctcaa

SEQ ID NO: 16075 - RNA, 20 nt, synthetic construct
  source 1..20: mol_type = other RNA
cattcaatgctatggtgact

SEQ ID NO: 16076 - RNA, 20 nt, synthetic construct
  source 1..20: mol_type = other RNA
cattccaaaaaacactttct

SEQ ID NO: 16077 - RNA, 20 nt, synthetic construct
  source 1..20: mol_type = other RNA
cattcgtgcaagttaacacg

SEQ ID NO: 16078 - RNA, 20 nt, synthetic construct
  source 1..20: mol_type = other RNA
cattgaaggtatttaagatt

SEQ ID NO: 16079 - RNA, 20 nt, synthetic construct
  source 1..20: mol_type = other RNA
cattgaatgtgtagtttata

SEQ ID NO: 16080 - RNA, 20 nt, synthetic construct
  source 1..20: mol_type = other RNA
cattgagagccgtaacacca

SEQ ID NO: 16081 - RNA, 20 nt, synthetic construct
  source 1..20: mol_type = other RNA
cattgagttagatcaatgct

SEQ ID NO: 16082 - RNA, 20 nt, synthetic construct
  source 1..20: mol_type = other RNA
cattgatctaactcaatgtg

SEQ ID NO: 16083 - RNA, 20 nt, synthetic construct
  source 1..20: mol_type = other RNA
cattgatttatacagagtac

SEQ ID NO: 16084 - RNA, 20 nt, synthetic construct
  source 1..20: mol_type = other RNA
cattgttccttcaacgagca

SEQ ID NO: 16085 - RNA, 20 nt, synthetic construct
  source 1..20: mol_type = other RNA
catttaacaaaaagaggaga

SEQ ID NO: 16086 - RNA, 20 nt, synthetic construct
  source 1..20: mol_type = other RNA
catttagcattgatctaact

SEQ ID NO: 16087 - RNA, 20 nt, synthetic construct
  source 1..20: mol_type = other RNA
catttcactcccttttctcc

SEQ ID NO: 16088 - RNA, 20 nt, synthetic construct
  source 1..20: mol_type = other RNA
catttctcaaactgtacttt

SEQ ID NO: 16089 - RNA, 20 nt, synthetic construct
  source 1..20: mol_type = other RNA
catttctttgatttcattta

SEQ ID NO: 16090 - RNA, 20 nt, synthetic construct
  source 1..20: mol_type = other RNA
cattttttgtcactataatt

SEQ ID NO: 16091 - RNA, 20 nt, synthetic construct
  source 1..20: mol_type = other RNA
ccaaaaaacactttctctct

SEQ ID NO: 16092 - RNA, 20 nt, synthetic construct
  source 1..20: mol_type = other RNA
ccaaaagaactaaagtacag

SEQ ID NO: 16093 - RNA, 20 nt, synthetic construct
  source 1..20: mol_type = other RNA
ccaaactagaattgaatctt

SEQ ID NO: 16094 - RNA, 20 nt, synthetic construct
  source 1..20: mol_type = other RNA
ccaacaaaaaagtttatttt

SEQ ID NO: 16095 - RNA, 20 nt, synthetic construct
  source 1..20: mol_type = other RNA
ccaaccttaccttttctggg

SEQ ID NO: 16096 - RNA, 20 nt, synthetic construct
  source 1..20: mol_type = other RNA
ccaaggtaaaagaattgctt

SEQ ID NO: 16097 - RNA, 20 nt, synthetic construct
  source 1..20: mol_type = other RNA
ccaatatttgcccagaaaag

SEQ ID NO: 16098 - RNA, 20 nt, synthetic construct
  source 1..20: mol_type = other RNA
ccacatatccattgttcctt

SEQ ID NO: 16099 - RNA, 20 nt, synthetic construct
  source 1..20: mol_type = other RNA
ccacattgagttagatcaat

SEQ ID NO: 16100 - RNA, 20 nt, synthetic construct
  source 1..20: mol_type = other RNA
ccacctgagggagtggagaa

SEQ ID NO: 16101 - RNA, 20 nt, synthetic construct
  source 1..20: mol_type = other RNA
ccacgttgcttgaaattgaa

SEQ ID NO: 16102 - RNA, 20 nt, synthetic construct
  source 1..20: mol_type = other RNA
ccactccctcaggtggtgtt

SEQ ID NO: 16103 - RNA, 20 nt, synthetic construct
  source 1..20: mol_type = other RNA
ccactgtgttctgtgtctct

SEQ ID NO: 16104 - RNA, 20 nt, synthetic construct
  source 1..20: mol_type = other RNA
ccagaaaaggtaaggttggt

SEQ ID NO: 16105 - RNA, 20 nt, synthetic construct
  source 1..20: mol_type = other RNA
ccagaagaaaacagttccac

SEQ ID NO: 16106 - RNA, 20 nt, synthetic construct
  source 1..20: mol_type = other RNA
ccagaccagcatgggcaata

SEQ ID NO: 16107 - RNA, 20 nt, synthetic construct
  source 1..20: mol_type = other RNA
ccagaggaacacagcattga

SEQ ID NO: 16108 - RNA, 20 nt, synthetic construct
  source 1..20: mol_type = other RNA
ccagcatgggcaatacatta

SEQ ID NO: 16109 - RNA, 20 nt, synthetic construct
  source 1..20: mol_type = other RNA
ccagtatttccagaccagca

SEQ ID NO: 16110 - RNA, 20 nt, synthetic construct
  source 1..20: mol_type = other RNA
ccatagcattgaatgtgtag

SEQ ID NO: 16111 - RNA, 20 nt, synthetic construct
  source 1..20: mol_type = other RNA
ccatatatagtaagtgtcat

SEQ ID NO: 16112 - RNA, 20 nt, synthetic construct
  source 1..20: mol_type = other RNA
ccatcataagtttttctgaa

SEQ ID NO: 16113 - RNA, 20 nt, synthetic construct
  source 1..20: mol_type = other RNA
ccatccttgtatattgtcac

SEQ ID NO: 16114 - RNA, 20 nt, synthetic construct
  source 1..20: mol_type = other RNA
ccatgctggtctggaaatac

SEQ ID NO: 16115 - RNA, 20 nt, synthetic construct
  source 1..20: mol_type = other RNA
ccatgtgctcgttgaaggaa

SEQ ID NO: 16116 - RNA, 20 nt, synthetic construct
  source 1..20: mol_type = other RNA
ccattccaaaaaacactttc

SEQ ID NO: 16117 - RNA, 20 nt, synthetic construct
  source 1..20: mol_type = other RNA
ccattgttccttcaacgagc

SEQ ID NO: 16118 - RNA, 20 nt, synthetic construct
  source 1..20: mol_type = other RNA
cccaacaaaaaagtttattt

SEQ ID NO: 16119 - RNA, 20 nt, synthetic construct
  source 1..20: mol_type = other RNA
cccagaaaaggtaaggttgg

SEQ ID NO: 16120 - RNA, 20 nt, synthetic construct
  source 1..20: mol_type = other RNA
cccagtatttccagaccagc

SEQ ID NO: 16121 - RNA, 20 nt, synthetic construct
  source 1..20: mol_type = other RNA
cccatatatagtaagtgtca

SEQ ID NO: 16122 - RNA, 20 nt, synthetic construct
  source 1..20: mol_type = other RNA
cccatcataagtttttctga

SEQ ID NO: 16123 - RNA, 20 nt, synthetic construct
  source 1..20: mol_type = other RNA
cccatgctggtctggaaata

SEQ ID NO: 16124 - RNA, 20 nt, synthetic construct
  source 1..20: mol_type = other RNA
cccctcaactttaataataa

SEQ ID NO: 16125 - RNA, 20 nt, synthetic construct
  source 1..20: mol_type = other RNA
ccctcaactttaataataaa

SEQ ID NO: 16126 - RNA, 20 nt, synthetic construct
  source 1..20: mol_type = other RNA
ccctcaggtggtgttacggc

SEQ ID NO: 16127 - RNA, 20 nt, synthetic construct
  source 1..20: mol_type = other RNA
cccttttctccactgtgttc

SEQ ID NO: 16128 - RNA, 20 nt, synthetic construct
  source 1..20: mol_type = other RNA
ccgtaacaccacctgaggga

SEQ ID NO: 16129 - RNA, 20 nt, synthetic construct
  source 1..20: mol_type = other RNA
ccgtgttaacttgcacgaat

SEQ ID NO: 16130 - RNA, 20 nt, synthetic construct
  source 1..20: mol_type = other RNA
cctaccaaccttaccttttc

SEQ ID NO: 16131 - RNA, 20 nt, synthetic construct
  source 1..20: mol_type = other RNA
cctagaacacagagacacag

SEQ ID NO: 16132 - RNA, 20 nt, synthetic construct
  source 1..20: mol_type = other RNA
cctagacttcttaactctat

SEQ ID NO: 16133 - RNA, 20 nt, synthetic construct
  source 1..20: mol_type = other RNA
cctagatgaccacatatcca

SEQ ID NO: 16134 - RNA, 20 nt, synthetic construct
  source 1..20: mol_type = other RNA
cctattaagttagttgctca

SEQ ID NO: 16135 - RNA, 20 nt, synthetic construct
  source 1..20: mol_type = other RNA
cctcaactttaataataaat

SEQ ID NO: 16136 - RNA, 20 nt, synthetic construct
  source 1..20: mol_type = other RNA
cctcaggtggtgttacggct

SEQ ID NO: 16137 - RNA, 20 nt, synthetic construct
  source 1..20: mol_type = other RNA
cctcattttttgtcactata

SEQ ID NO: 16138 - RNA, 20 nt, synthetic construct
  source 1..20: mol_type = other RNA
cctctggtactctgtataaa

SEQ ID NO: 16139 - RNA, 20 nt, synthetic construct
  source 1..20: mol_type = other RNA
cctctttttgttaaatgtat

SEQ ID NO: 16140 - RNA, 20 nt, synthetic construct
  source 1..20: mol_type = other RNA
cctgagggagtggagaaagg

SEQ ID NO: 16141 - RNA, 20 nt, synthetic construct
  source 1..20: mol_type = other RNA
cctgtttttaaaagctaatt

SEQ ID NO: 16142 - RNA, 20 nt, synthetic construct
  source 1..20: mol_type = other RNA
ccttaccttttctgggcaaa

SEQ ID NO: 16143 - RNA, 20 nt, synthetic construct
  source 1..20: mol_type = other RNA
ccttatatgtcttaaccatc

SEQ ID NO: 16144 - RNA, 20 nt, synthetic construct
  source 1..20: mol_type = other RNA
ccttcaacgagcacatggta

SEQ ID NO: 16145 - RNA, 20 nt, synthetic construct
  source 1..20: mol_type = other RNA
ccttcaatgtcacaagcagc

SEQ ID NO: 16146 - RNA, 20 nt, synthetic construct
  source 1..20: mol_type = other RNA
ccttcttccacattgagtta

SEQ ID NO: 16147 - RNA, 20 nt, synthetic construct
  source 1..20: mol_type = other RNA
ccttgtatattgtcacaaaa

SEQ ID NO: 16148 - RNA, 20 nt, synthetic construct
  source 1..20: mol_type = other RNA
cctttctccactccctcagg

SEQ ID NO: 16149 - RNA, 20 nt, synthetic construct
  source 1..20: mol_type = other RNA
ccttttctccactgtgttct

SEQ ID NO: 16150 - RNA, 20 nt, synthetic construct
  source 1..20: mol_type = other RNA
ccttttctgggcaaatattg

SEQ ID NO: 16151 - RNA, 20 nt, synthetic construct
  source 1..20: mol_type = other RNA
cgaatgtaaccttcttccac

SEQ ID NO: 16152 - RNA, 20 nt, synthetic construct
  source 1..20: mol_type = other RNA
cgagcacatggtaaagagcc

SEQ ID NO: 16153 - RNA, 20 nt, synthetic construct
  source 1..20: mol_type = other RNA
cggctctcaatgctgtgttc

SEQ ID NO: 16154 - RNA, 20 nt, synthetic construct
  source 1..20: mol_type = other RNA
cggcttaatgattaactatg

SEQ ID NO: 16155 - RNA, 20 nt, synthetic construct
  source 1..20: mol_type = other RNA
cgtaacaccacctgagggag

SEQ ID NO: 16156 - RNA, 20 nt, synthetic construct
  source 1..20: mol_type = other RNA
cgtgcaagttaacacggctt

SEQ ID NO: 16157 - RNA, 20 nt, synthetic construct
  source 1..20: mol_type = other RNA
cgtggaactgttttcttctg

SEQ ID NO: 16158 - RNA, 20 nt, synthetic construct
  source 1..20: mol_type = other RNA
cgtgttaacttgcacgaatg

SEQ ID NO: 16159 - RNA, 20 nt, synthetic construct
  source 1..20: mol_type = other RNA
cgttgaaggaacaatggata

SEQ ID NO: 16160 - RNA, 20 nt, synthetic construct
  source 1..20: mol_type = other RNA
cgttgcttgaaattgaaaat

SEQ ID NO: 16161 - RNA, 20 nt, synthetic construct
  source 1..20: mol_type = other RNA
ctaaagtacagtttgagaaa

SEQ ID NO: 16162 - RNA, 20 nt, synthetic construct
  source 1..20: mol_type = other RNA
ctaaatgaaatcaaagaaat

SEQ ID NO: 16163 - RNA, 20 nt, synthetic construct
  source 1..20: mol_type = other RNA
ctaacaaacttcagaaaaac

SEQ ID NO: 16164 - RNA, 20 nt, synthetic construct
  source 1..20: mol_type = other RNA
ctaactcaatgtggaagaag

SEQ ID NO: 16165 - RNA, 20 nt, synthetic construct
  source 1..20: mol_type = other RNA
ctaacttaataggtaatttg

SEQ ID NO: 16166 - RNA, 20 nt, synthetic construct
  source 1..20: mol_type = other RNA
ctaagctaacaaacttcaga

SEQ ID NO: 16167 - RNA, 20 nt, synthetic construct
  source 1..20: mol_type = other RNA
ctacacattcaatgctatgg

SEQ ID NO: 16168 - RNA, 20 nt, synthetic construct
  source 1..20: mol_type = other RNA
ctaccaaccttaccttttct

SEQ ID NO: 16169 - RNA, 20 nt, synthetic construct
  source 1..20: mol_type = other RNA
ctacctgtttttaaaagcta

SEQ ID NO: 16170 - RNA, 20 nt, synthetic construct
  source 1..20: mol_type = other RNA
ctagaacacagagacacaga

SEQ ID NO: 16171 - RNA, 20 nt, synthetic construct
  source 1..20: mol_type = other RNA
ctagaattgaatcttaaata

SEQ ID NO: 16172 - RNA, 20 nt, synthetic construct
  source 1..20: mol_type = other RNA
ctagacttcttaactctata

SEQ ID NO: 16173 - RNA, 20 nt, synthetic construct
  source 1..20: mol_type = other RNA
ctagatgaccacatatccat

SEQ ID NO: 16174 - RNA, 20 nt, synthetic construct
  source 1..20: mol_type = other RNA
ctaggaccaaactagaattg

SEQ ID NO: 16175 - RNA, 20 nt, synthetic construct
  source 1..20: mol_type = other RNA
ctaggctctttaccatgtgc

SEQ ID NO: 16176 - RNA, 20 nt, synthetic construct
  source 1..20: mol_type = other RNA
ctaggtctgcttccagaaga

SEQ ID NO: 16177 - RNA, 20 nt, synthetic construct
  source 1..20: mol_type = other RNA
ctagtttggtcctagatgac

SEQ ID NO: 16178 - RNA, 20 nt, synthetic construct
  source 1..20: mol_type = other RNA
ctatatataccaatatttgc

SEQ ID NO: 16179 - RNA, 20 nt, synthetic construct
  source 1..20: mol_type = other RNA
ctatatatgggattttgtga

SEQ ID NO: 16180 - RNA, 20 nt, synthetic construct
  source 1..20: mol_type = other RNA
ctatggtgactacctgtttt

SEQ ID NO: 16181 - RNA, 20 nt, synthetic construct
  source 1..20: mol_type = other RNA
ctatgttcacctaccaacct

SEQ ID NO: 16182 - RNA, 20 nt, synthetic construct
  source 1..20: mol_type = other RNA
ctattaagttagttgctcat

SEQ ID NO: 16183 - RNA, 20 nt, synthetic construct
  source 1..20: mol_type = other RNA
ctcaaactgtactttagttc

SEQ ID NO: 16184 - RNA, 20 nt, synthetic construct
  source 1..20: mol_type = other RNA
ctcaagcaattcttttacct

SEQ ID NO: 16185 - RNA, 20 nt, synthetic construct
  source 1..20: mol_type = other RNA
ctcaatgctgtgttcctctg

SEQ ID NO: 16186 - RNA, 20 nt, synthetic construct
  source 1..20: mol_type = other RNA
ctcaatgtggaagaaggtta

SEQ ID NO: 16187 - RNA, 20 nt, synthetic construct
  source 1..20: mol_type = other RNA
ctcaggtggtgttacggctc

SEQ ID NO: 16188 - RNA, 20 nt, synthetic construct
  source 1..20: mol_type = other RNA
ctcatttctttgatttcatt

SEQ ID NO: 16189 - RNA, 20 nt, synthetic construct
  source 1..20: mol_type = other RNA
ctcattttttgtcactataa

SEQ ID NO: 16190 - RNA, 20 nt, synthetic construct
  source 1..20: mol_type = other RNA
ctccactccctcaggtggtg

SEQ ID NO: 16191 - RNA, 20 nt, synthetic construct
  source 1..20: mol_type = other RNA
ctccactgtgttctgtgtct

SEQ ID NO: 16192 - RNA, 20 nt, synthetic construct
  source 1..20: mol_type = other RNA
ctccctcaggtggtgttacg

SEQ ID NO: 16193 - RNA, 20 nt, synthetic construct
  source 1..20: mol_type = other RNA
ctcccttttctccactgtgt

SEQ ID NO: 16194 - RNA, 20 nt, synthetic construct
  source 1..20: mol_type = other RNA
ctcctcattttttgtcacta

SEQ ID NO: 16195 - RNA, 20 nt, synthetic construct
  source 1..20: mol_type = other RNA
ctcctctttttgttaaatgt

SEQ ID NO: 16196 - RNA, 20 nt, synthetic construct
  source 1..20: mol_type = other RNA
ctcgttgaaggaacaatgga

SEQ ID NO: 16197 - RNA, 20 nt, synthetic construct
  source 1..20: mol_type = other RNA
ctctatatataccaatattt

SEQ ID NO: 16198 - RNA, 20 nt, synthetic construct
  source 1..20: mol_type = other RNA
ctctcaatgctgtgttcctc

SEQ ID NO: 16199 - RNA, 20 nt, synthetic construct
  source 1..20: mol_type = other RNA
ctctctgaagcctttctcca

SEQ ID NO: 16200 - RNA, 20 nt, synthetic construct
  source 1..20: mol_type = other RNA
ctctgaagcctttctccact

SEQ ID NO: 16201 - RNA, 20 nt, synthetic construct
  source 1..20: mol_type = other RNA
ctctggtactctgtataaat

SEQ ID NO: 16202 - RNA, 20 nt, synthetic construct
  source 1..20: mol_type = other RNA
ctctgtataaatcaatgtat

SEQ ID NO: 16203 - RNA, 20 nt, synthetic construct
  source 1..20: mol_type = other RNA
ctctgtgttctaggctcttt

SEQ ID NO: 16204 - RNA, 20 nt, synthetic construct
  source 1..20: mol_type = other RNA
ctcttaaaatcataaaaaag

SEQ ID NO: 16205 - RNA, 20 nt, synthetic construct
  source 1..20: mol_type = other RNA
ctctttaccatgtgctcgtt

SEQ ID NO: 16206 - RNA, 20 nt, synthetic construct
  source 1..20: mol_type = other RNA
ctctttttgttaaatgtata

SEQ ID NO: 16207 - RNA, 20 nt, synthetic construct
  source 1..20: mol_type = other RNA
ctgaagcctttctccactcc

SEQ ID NO: 16208 - RNA, 20 nt, synthetic construct
  source 1..20: mol_type = other RNA
ctgaagtttgttagcttagt

SEQ ID NO: 16209 - RNA, 20 nt, synthetic construct
  source 1..20: mol_type = other RNA
ctgagggagtggagaaaggc

SEQ ID NO: 16210 - RNA, 20 nt, synthetic construct
  source 1..20: mol_type = other RNA
ctgcttccagaagaaaacag

SEQ ID NO: 16211 - RNA, 20 nt, synthetic construct
  source 1..20: mol_type = other RNA
ctgcttgtgacattgaaggt

SEQ ID NO: 16212 - RNA, 20 nt, synthetic construct
  source 1..20: mol_type = other RNA
ctggaaatactgggctcaag

SEQ ID NO: 16213 - RNA, 20 nt, synthetic construct
  source 1..20: mol_type = other RNA
ctggaagcagacctagactt

SEQ ID NO: 16214 - RNA, 20 nt, synthetic construct
  source 1..20: mol_type = other RNA
ctgggcaaatattggtatat

SEQ ID NO: 16215 - RNA, 20 nt, synthetic construct
  source 1..20: mol_type = other RNA
ctgggctcaagcaattcttt

SEQ ID NO: 16216 - RNA, 20 nt, synthetic construct
  source 1..20: mol_type = other RNA
ctggtactctgtataaatca

SEQ ID NO: 16217 - RNA, 20 nt, synthetic construct
  source 1..20: mol_type = other RNA
ctggtctggaaatactgggc

SEQ ID NO: 16218 - RNA, 20 nt, synthetic construct
  source 1..20: mol_type = other RNA
ctgtactttagttcttttgg

SEQ ID NO: 16219 - RNA, 20 nt, synthetic construct
  source 1..20: mol_type = other RNA
ctgtataaatcaatgtataa

SEQ ID NO: 16220 - RNA, 20 nt, synthetic construct
  source 1..20: mol_type = other RNA
ctgtattataaactacacat

SEQ ID NO: 16221 - RNA, 20 nt, synthetic construct
  source 1..20: mol_type = other RNA
ctgtgtctctgtgttctagg

SEQ ID NO: 16222 - RNA, 20 nt, synthetic construct
  source 1..20: mol_type = other RNA
ctgtgttcctctggtactct

SEQ ID NO: 16223 - RNA, 20 nt, synthetic construct
  source 1..20: mol_type = other RNA
ctgtgttctaggctctttac

SEQ ID NO: 16224 - RNA, 20 nt, synthetic construct
  source 1..20: mol_type = other RNA
ctgtgttctgtgtctctgtg

SEQ ID NO: 16225 - RNA, 20 nt, synthetic construct
  source 1..20: mol_type = other RNA
ctgtttccaaaagaactaaa

SEQ ID NO: 16226 - RNA, 20 nt, synthetic construct
  source 1..20: mol_type = other RNA
ctgttttcttctggaagcag

SEQ ID NO: 16227 - RNA, 20 nt, synthetic construct
  source 1..20: mol_type = other RNA
ctgtttttaaaagctaattt

SEQ ID NO: 16228 - RNA, 20 nt, synthetic construct
  source 1..20: mol_type = other RNA
cttaaataccttcaatgtca

SEQ ID NO: 16229 - RNA, 20 nt, synthetic construct
  source 1..20: mol_type = other RNA
cttaaccatccttgtatatt

SEQ ID NO: 16230 - RNA, 20 nt, synthetic construct
  source 1..20: mol_type = other RNA
cttaactctatatataccaa

SEQ ID NO: 16231 - RNA, 20 nt, synthetic construct
  source 1..20: mol_type = other RNA
cttaataggtaatttgaaat

SEQ ID NO: 16232 - RNA, 20 nt, synthetic construct
  source 1..20: mol_type = other RNA
cttaatgattaactatgttc

SEQ ID NO: 16233 - RNA, 20 nt, synthetic construct
  source 1..20: mol_type = other RNA
cttaatgtattgcccatgct

SEQ ID NO: 16234 - RNA, 20 nt, synthetic construct
  source 1..20: mol_type = other RNA
cttaattcattacttttttc

SEQ ID NO: 16235 - RNA, 20 nt, synthetic construct
  source 1..20: mol_type = other RNA
cttaccttttctgggcaaat

SEQ ID NO: 16236 - RNA, 20 nt, synthetic construct
  source 1..20: mol_type = other RNA
cttactatatatgggatttt

SEQ ID NO: 16237 - RNA, 20 nt, synthetic construct
  source 1..20: mol_type = other RNA
cttagtaacaattttgataa

SEQ ID NO: 16238 - RNA, 20 nt, synthetic construct
  source 1..20: mol_type = other RNA
cttatatgtcttaaccatcc

SEQ ID NO: 16239 - RNA, 20 nt, synthetic construct
  source 1..20: mol_type = other RNA
cttatgatgggcaagctgct

SEQ ID NO: 16240 - RNA, 20 nt, synthetic construct
  source 1..20: mol_type = other RNA
cttcaacgagcacatggtaa

SEQ ID NO: 16241 - RNA, 20 nt, synthetic construct
  source 1..20: mol_type = other RNA
cttcaatgtcacaagcagct

SEQ ID NO: 16242 - RNA, 20 nt, synthetic construct
  source 1..20: mol_type = other RNA
cttcagaaaaacttatgatg

SEQ ID NO: 16243 - RNA, 20 nt, synthetic construct
  source 1..20: mol_type = other RNA
cttcagagagaaagtgtttt

SEQ ID NO: 16244 - RNA, 20 nt, synthetic construct
  source 1..20: mol_type = other RNA
cttccacattgagttagatc

SEQ ID NO: 16245 - RNA, 20 nt, synthetic construct
  source 1..20: mol_type = other RNA
cttccagaagaaaacagttc

SEQ ID NO: 16246 - RNA, 20 nt, synthetic construct
  source 1..20: mol_type = other RNA
cttctggaagcagacctaga

SEQ ID NO: 16247 - RNA, 20 nt, synthetic construct
  source 1..20: mol_type = other RNA
cttcttaactctatatatac

SEQ ID NO: 16248 - RNA, 20 nt, synthetic construct
  source 1..20: mol_type = other RNA
cttcttccacattgagttag

SEQ ID NO: 16249 - RNA, 20 nt, synthetic construct
  source 1..20: mol_type = other RNA
cttgagcccagtatttccag

SEQ ID NO: 16250 - RNA, 20 nt, synthetic construct
  source 1..20: mol_type = other RNA
cttgattttcaatttcaagc

SEQ ID NO: 16251 - RNA, 20 nt, synthetic construct
  source 1..20: mol_type = other RNA
cttgcacgaatgtaaccttc

SEQ ID NO: 16252 - RNA, 20 nt, synthetic construct
  source 1..20: mol_type = other RNA
cttgcccatcataagttttt

SEQ ID NO: 16253 - RNA, 20 nt, synthetic construct
  source 1..20: mol_type = other RNA
cttgtaaatctcttaaaatc

SEQ ID NO: 16254 - RNA, 20 nt, synthetic construct
  source 1..20: mol_type = other RNA
cttgtatattgtcacaaaat

SEQ ID NO: 16255 - RNA, 20 nt, synthetic construct
  source 1..20: mol_type = other RNA
cttgtgacattgaaggtatt

SEQ ID NO: 16256 - RNA, 20 nt, synthetic construct
  source 1..20: mol_type = other RNA
ctttaataataaatttaccc

SEQ ID NO: 16257 - RNA, 20 nt, synthetic construct
  source 1..20: mol_type = other RNA
ctttaatgacacttactata

SEQ ID NO: 16258 - RNA, 20 nt, synthetic construct
  source 1..20: mol_type = other RNA
ctttaccatgtgctcgttga

SEQ ID NO: 16259 - RNA, 20 nt, synthetic construct
  source 1..20: mol_type = other RNA
ctttagttcttttggaaaca

SEQ ID NO: 16260 - RNA, 20 nt, synthetic construct
  source 1..20: mol_type = other RNA
ctttctccactccctcaggt

SEQ ID NO: 16261 - RNA, 20 nt, synthetic construct
  source 1..20: mol_type = other RNA
ctttctctctgaagcctttc

SEQ ID NO: 16262 - RNA, 20 nt, synthetic construct
  source 1..20: mol_type = other RNA
ctttgatttcatttagcatt

SEQ ID NO: 16263 - RNA, 20 nt, synthetic construct
  source 1..20: mol_type = other RNA
ctttgctgtattataaacta

SEQ ID NO: 16264 - RNA, 20 nt, synthetic construct
  source 1..20: mol_type = other RNA
cttttaaaaacaggtagtca

SEQ ID NO: 16265 - RNA, 20 nt, synthetic construct
  source 1..20: mol_type = other RNA
cttttctccactgtgttctg

SEQ ID NO: 16266 - RNA, 20 nt, synthetic construct
  source 1..20: mol_type = other RNA
cttttctgggcaaatattgg

SEQ ID NO: 16267 - RNA, 20 nt, synthetic construct
  source 1..20: mol_type = other RNA
cttttggaaacagtgatcca

SEQ ID NO: 16268 - RNA, 20 nt, synthetic construct
  source 1..20: mol_type = other RNA
cttttttatgattttaagag

SEQ ID NO: 16269 - RNA, 20 nt, synthetic construct
  source 1..20: mol_type = other RNA
cttttttcccctcaacttta

SEQ ID NO: 16270 - RNA, 20 nt, synthetic construct
  source 1..20: mol_type = other RNA
cttttttgttgggtaaattt

SEQ ID NO: 16271 - RNA, 20 nt, synthetic construct
  source 1..20: mol_type = other RNA
gaaaaaagtaatgaattaag

SEQ ID NO: 16272 - RNA, 20 nt, synthetic construct
  source 1..20: mol_type = other RNA
gaaaaacttatgatgggcaa

SEQ ID NO: 16273 - RNA, 20 nt, synthetic construct
  source 1..20: mol_type = other RNA
gaaaacagttccacgttgct

SEQ ID NO: 16274 - RNA, 20 nt, synthetic construct
  source 1..20: mol_type = other RNA
gaaaagggagtgaaatgtct

SEQ ID NO: 16275 - RNA, 20 nt, synthetic construct
  source 1..20: mol_type = other RNA
gaaaaggtaaggttggtagg

SEQ ID NO: 16276 - RNA, 20 nt, synthetic construct
  source 1..20: mol_type = other RNA
gaaacagtgatccattccaa

SEQ ID NO: 16277 - RNA, 20 nt, synthetic construct
  source 1..20: mol_type = other RNA
gaaaggcttcagagagaaag

SEQ ID NO: 16278 - RNA, 20 nt, synthetic construct
  source 1..20: mol_type = other RNA
gaaagtgttttttggaatgg

SEQ ID NO: 16279 - RNA, 20 nt, synthetic construct
  source 1..20: mol_type = other RNA
gaaatactgggctcaagcaa

SEQ ID NO: 16280 - RNA, 20 nt, synthetic construct
  source 1..20: mol_type = other RNA
gaaatcaaagaaatgagcaa

SEQ ID NO: 16281 - RNA, 20 nt, synthetic construct
  source 1..20: mol_type = other RNA
gaaatgagcaactaacttaa

SEQ ID NO: 16282 - RNA, 20 nt, synthetic construct
  source 1..20: mol_type = other RNA
gaaatgcatacttaattcat

SEQ ID NO: 16283 - RNA, 20 nt, synthetic construct
  source 1..20: mol_type = other RNA
gaaatgtctttaatgacact

SEQ ID NO: 16284 - RNA, 20 nt, synthetic construct
  source 1..20: mol_type = other RNA
gaaattgtatttaactttgc

SEQ ID NO: 16285 - RNA, 20 nt, synthetic construct
  source 1..20: mol_type = other RNA
gaacaatggatatgtggtca

SEQ ID NO: 16286 - RNA, 20 nt, synthetic construct
  source 1..20: mol_type = other RNA
gaacacagagacacagaaca

SEQ ID NO: 16287 - RNA, 20 nt, synthetic construct
  source 1..20: mol_type = other RNA
gaacacagcattgagagccg

SEQ ID NO: 16288 - RNA, 20 nt, synthetic construct
  source 1..20: mol_type = other RNA
gaacacagtggagaaaaggg

SEQ ID NO: 16289 - RNA, 20 nt, synthetic construct
  source 1..20: mol_type = other RNA
gaacatagttaatcattaag

SEQ ID NO: 16290 - RNA, 20 nt, synthetic construct
  source 1..20: mol_type = other RNA
gaactaaagtacagtttgag

SEQ ID NO: 16291 - RNA, 20 nt, synthetic construct
  source 1..20: mol_type = other RNA
gaactgttttcttctggaag

SEQ ID NO: 16292 - RNA, 20 nt, synthetic construct
  source 1..20: mol_type = other RNA
gaagaaaacagttccacgtt

SEQ ID NO: 16293 - RNA, 20 nt, synthetic construct
  source 1..20: mol_type = other RNA
gaagaaggttacattcgtgc

SEQ ID NO: 16294 - RNA, 20 nt, synthetic construct
  source 1..20: mol_type = other RNA
gaagcagacctagacttctt

SEQ ID NO: 16295 - RNA, 20 nt, synthetic construct
  source 1..20: mol_type = other RNA
gaagcctttctccactccct

SEQ ID NO: 16296 - RNA, 20 nt, synthetic construct
  source 1..20: mol_type = other RNA
gaaggaacaatggatatgtg

SEQ ID NO: 16297 - RNA, 20 nt, synthetic construct
  source 1..20: mol_type = other RNA
gaaggtatttaagattcaat

SEQ ID NO: 16298 - RNA, 20 nt, synthetic construct
  source 1..20: mol_type = other RNA
gaaggttacattcgtgcaag

SEQ ID NO: 16299 - RNA, 20 nt, synthetic construct
  source 1..20: mol_type = other RNA
gaagtctaggtctgcttcca

SEQ ID NO: 16300 - RNA, 20 nt, synthetic construct
  source 1..20: mol_type = other RNA
gaagtttgttagcttagtaa

SEQ ID NO: 16301 - RNA, 20 nt, synthetic construct
  source 1..20: mol_type = other RNA
gaatcttaaataccttcaat

SEQ ID NO: 16302 - RNA, 20 nt, synthetic construct
  source 1..20: mol_type = other RNA
gaatggatcactgtttccaa

SEQ ID NO: 16303 - RNA, 20 nt, synthetic construct
  source 1..20: mol_type = other RNA
gaatgtaaccttcttccaca

SEQ ID NO: 16304 - RNA, 20 nt, synthetic construct
  source 1..20: mol_type = other RNA
gaatgtgtagtttataatac

SEQ ID NO: 16305 - RNA, 20 nt, synthetic construct
  source 1..20: mol_type = other RNA
gaattaagtatgcatttctc

SEQ ID NO: 16306 - RNA, 20 nt, synthetic construct
  source 1..20: mol_type = other RNA
gaattgaatcttaaatacct

SEQ ID NO: 16307 - RNA, 20 nt, synthetic construct
  source 1..20: mol_type = other RNA
gaattgcttgagcccagtat

SEQ ID NO: 16308 - RNA, 20 nt, synthetic construct
  source 1..20: mol_type = other RNA
gacaaaaaatgaggagcata

SEQ ID NO: 16309 - RNA, 20 nt, synthetic construct
  source 1..20: mol_type = other RNA
gacaatatacaaggatggtt

SEQ ID NO: 16310 - RNA, 20 nt, synthetic construct
  source 1..20: mol_type = other RNA
gacacagaacacagtggaga

SEQ ID NO: 16311 - RNA, 20 nt, synthetic construct
  source 1..20: mol_type = other RNA
gacacttactatatatggga

SEQ ID NO: 16312 - RNA, 20 nt, synthetic construct
  source 1..20: mol_type = other RNA
gacatataaggtgatgcaaa

SEQ ID NO: 16313 - RNA, 20 nt, synthetic construct
  source 1..20: mol_type = other RNA
gacattgaaggtatttaaga

SEQ ID NO: 16314 - RNA, 20 nt, synthetic construct
  source 1..20: mol_type = other RNA
gacatttcactcccttttct

SEQ ID NO: 16315 - RNA, 20 nt, synthetic construct
  source 1..20: mol_type = other RNA
gaccaaactagaattgaatc

SEQ ID NO: 16316 - RNA, 20 nt, synthetic construct
  source 1..20: mol_type = other RNA
gaccacatatccattgttcc

SEQ ID NO: 16317 - RNA, 20 nt, synthetic construct
  source 1..20: mol_type = other RNA
gaccagcatgggcaatacat

SEQ ID NO: 16318 - RNA, 20 nt, synthetic construct
  source 1..20: mol_type = other RNA
gacctagacttcttaactct

SEQ ID NO: 16319 - RNA, 20 nt, synthetic construct
  source 1..20: mol_type = other RNA
gactacctgtttttaaaagc

SEQ ID NO: 16320 - RNA, 20 nt, synthetic construct
  source 1..20: mol_type = other RNA
gacttcttaactctatatat

SEQ ID NO: 16321 - RNA, 20 nt, synthetic construct
  source 1..20: mol_type = other RNA
gacttgtaaatctcttaaaa

SEQ ID NO: 16322 - RNA, 20 nt, synthetic construct
  source 1..20: mol_type = other RNA
gagaaaagggagtgaaatgt

SEQ ID NO: 16323 - RNA, 20 nt, synthetic construct
  source 1..20: mol_type = other RNA
gagaaaggcttcagagagaa

SEQ ID NO: 16324 - RNA, 20 nt, synthetic construct
  source 1..20: mol_type = other RNA
gagaaagtgttttttggaat

SEQ ID NO: 16325 - RNA, 20 nt, synthetic construct
  source 1..20: mol_type = other RNA
gagaaatgcatacttaattc

SEQ ID NO: 16326 - RNA, 20 nt, synthetic construct
  source 1..20: mol_type = other RNA
gagacacagaacacagtgga

SEQ ID NO: 16327 - RNA, 20 nt, synthetic construct
  source 1..20: mol_type = other RNA
gagagaaagtgttttttgga

SEQ ID NO: 16328 - RNA, 20 nt, synthetic construct
  source 1..20: mol_type = other RNA
gagagccgtaacaccacctg

SEQ ID NO: 16329 - RNA, 20 nt, synthetic construct
  source 1..20: mol_type = other RNA
gagatttacaagtcaaaaat

SEQ ID NO: 16330 - RNA, 20 nt, synthetic construct
  source 1..20: mol_type = other RNA
gagcaactaacttaataggt

SEQ ID NO: 16331 - RNA, 20 nt, synthetic construct
  source 1..20: mol_type = other RNA
gagcacatggtaaagagcct

SEQ ID NO: 16332 - RNA, 20 nt, synthetic construct
  source 1..20: mol_type = other RNA
gagcatataattatacattg

SEQ ID NO: 16333 - RNA, 20 nt, synthetic construct
  source 1..20: mol_type = other RNA
gagcccagtatttccagacc

SEQ ID NO: 16334 - RNA, 20 nt, synthetic construct
  source 1..20: mol_type = other RNA
gagccgtaacaccacctgag

SEQ ID NO: 16335 - RNA, 20 nt, synthetic construct
  source 1..20: mol_type = other RNA
gagcctagaacacagagaca

SEQ ID NO: 16336 - RNA, 20 nt, synthetic construct
  source 1..20: mol_type = other RNA
gaggaacacagcattgagag

SEQ ID NO: 16337 - RNA, 20 nt, synthetic construct
  source 1..20: mol_type = other RNA
gaggagattaataacatttt

SEQ ID NO: 16338 - RNA, 20 nt, synthetic construct
  source 1..20: mol_type = other RNA
gaggagcatataattataca

SEQ ID NO: 16339 - RNA, 20 nt, synthetic construct
  source 1..20: mol_type = other RNA
gaggccaaggtaaaagaatt

SEQ ID NO: 16340 - RNA, 20 nt, synthetic construct
  source 1..20: mol_type = other RNA
gagggagtggagaaaggctt

SEQ ID NO: 16341 - RNA, 20 nt, synthetic construct
  source 1..20: mol_type = other RNA
gaggggaaaaaagtaatgaa

SEQ ID NO: 16342 - RNA, 20 nt, synthetic construct
  source 1..20: mol_type = other RNA
gagtaccagaggaacacagc

SEQ ID NO: 16343 - RNA, 20 nt, synthetic construct
  source 1..20: mol_type = other RNA
gagtgaaatgtctttaatga

SEQ ID NO: 16344 - RNA, 20 nt, synthetic construct
  source 1..20: mol_type = other RNA
gagtggagaaaggcttcaga

SEQ ID NO: 16345 - RNA, 20 nt, synthetic construct
  source 1..20: mol_type = other RNA
gagttaagaagtctaggtct

SEQ ID NO: 16346 - RNA, 20 nt, synthetic construct
  source 1..20: mol_type = other RNA
gagttagatcaatgctaaat

SEQ ID NO: 16347 - RNA, 20 nt, synthetic construct
  source 1..20: mol_type = other RNA
gatatgtggtcatctaggac

SEQ ID NO: 16348 - RNA, 20 nt, synthetic construct
  source 1..20: mol_type = other RNA
gatcaatgctaaatgaaatc

SEQ ID NO: 16349 - RNA, 20 nt, synthetic construct
  source 1..20: mol_type = other RNA
gatcactgtttccaaaagaa

SEQ ID NO: 16350 - RNA, 20 nt, synthetic construct
  source 1..20: mol_type = other RNA
gatccattccaaaaaacact

SEQ ID NO: 16351 - RNA, 20 nt, synthetic construct
  source 1..20: mol_type = other RNA
gatctaactcaatgtggaag

SEQ ID NO: 16352 - RNA, 20 nt, synthetic construct
  source 1..20: mol_type = other RNA
gatgaccacatatccattgt

SEQ ID NO: 16353 - RNA, 20 nt, synthetic construct
  source 1..20: mol_type = other RNA
gatgatgtcttaatgtattg

SEQ ID NO: 16354 - RNA, 20 nt, synthetic construct
  source 1..20: mol_type = other RNA
gatgggcaagctgcttgtga

SEQ ID NO: 16355 - RNA, 20 nt, synthetic construct
  source 1..20: mol_type = other RNA
gatggttaagacatataagg

SEQ ID NO: 16356 - RNA, 20 nt, synthetic construct
  source 1..20: mol_type = other RNA
gatgtcttaatgtattgccc

SEQ ID NO: 16357 - RNA, 20 nt, synthetic construct
  source 1..20: mol_type = other RNA
gattaactatgttcacctac

SEQ ID NO: 16358 - RNA, 20 nt, synthetic construct
  source 1..20: mol_type = other RNA
gattcaattctagtttggtc

SEQ ID NO: 16359 - RNA, 20 nt, synthetic construct
  source 1..20: mol_type = other RNA
gatttacaagtcaaaaataa

SEQ ID NO: 16360 - RNA, 20 nt, synthetic construct
  source 1..20: mol_type = other RNA
gatttatacagagtaccaga

SEQ ID NO: 16361 - RNA, 20 nt, synthetic construct
  source 1..20: mol_type = other RNA
gatttcatttagcattgatc

SEQ ID NO: 16362 - RNA, 20 nt, synthetic construct
  source 1..20: mol_type = other RNA
gattttaagagatttacaag

SEQ ID NO: 16363 - RNA, 20 nt, synthetic construct
  source 1..20: mol_type = other RNA
gattttcaatttcaagcaac

SEQ ID NO: 16364 - RNA, 20 nt, synthetic construct
  source 1..20: mol_type = other RNA
gattttgtgacaatatacaa

SEQ ID NO: 16365 - RNA, 20 nt, synthetic construct
  source 1..20: mol_type = other RNA
gcaaagttaaatacaatttc

SEQ ID NO: 16366 - RNA, 20 nt, synthetic construct
  source 1..20: mol_type = other RNA
gcaaatattggtatatatag

SEQ ID NO: 16367 - RNA, 20 nt, synthetic construct
  source 1..20: mol_type = other RNA
gcaacgtggaactgttttct

SEQ ID NO: 16368 - RNA, 20 nt, synthetic construct
  source 1..20: mol_type = other RNA
gcaactaacttaataggtaa

SEQ ID NO: 16369 - RNA, 20 nt, synthetic construct
  source 1..20: mol_type = other RNA
gcaagctgcttgtgacattg

SEQ ID NO: 16370 - RNA, 20 nt, synthetic construct
  source 1..20: mol_type = other RNA
gcaagttaacacggcttaat

SEQ ID NO: 16371 - RNA, 20 nt, synthetic construct
  source 1..20: mol_type = other RNA
gcaatacattaagacatcat

SEQ ID NO: 16372 - RNA, 20 nt, synthetic construct
  source 1..20: mol_type = other RNA
gcacatggtaaagagcctag

SEQ ID NO: 16373 - RNA, 20 nt, synthetic construct
  source 1..20: mol_type = other RNA
gcacgaatgtaaccttcttc

SEQ ID NO: 16374 - RNA, 20 nt, synthetic construct
  source 1..20: mol_type = other RNA
gcagacctagacttcttaac

SEQ ID NO: 16375 - RNA, 20 nt, synthetic construct
  source 1..20: mol_type = other RNA
gcagcttgcccatcataagt

SEQ ID NO: 16376 - RNA, 20 nt, synthetic construct
  source 1..20: mol_type = other RNA
gcatacttaattcattactt

SEQ ID NO: 16377 - RNA, 20 nt, synthetic construct
  source 1..20: mol_type = other RNA
gcatataattatacattgat

SEQ ID NO: 16378 - RNA, 20 nt, synthetic construct
  source 1..20: mol_type = other RNA
gcatcaccttatatgtctta

SEQ ID NO: 16379 - RNA, 20 nt, synthetic construct
  source 1..20: mol_type = other RNA
gcatgggcaatacattaaga

SEQ ID NO: 16380 - RNA, 20 nt, synthetic construct
  source 1..20: mol_type = other RNA
gcattgaatgtgtagtttat

SEQ ID NO: 16381 - RNA, 20 nt, synthetic construct
  source 1..20: mol_type = other RNA
gcattgagagccgtaacacc

SEQ ID NO: 16382 - RNA, 20 nt, synthetic construct
  source 1..20: mol_type = other RNA
gcattgatctaactcaatgt

SEQ ID NO: 16383 - RNA, 20 nt, synthetic construct
  source 1..20: mol_type = other RNA
gcatttctcaaactgtactt

SEQ ID NO: 16384 - RNA, 20 nt, synthetic construct
  source 1..20: mol_type = other RNA
gccaaggtaaaagaattgct

SEQ ID NO: 16385 - RNA, 20 nt, synthetic construct
  source 1..20: mol_type = other RNA
gcccagaaaaggtaaggttg

SEQ ID NO: 16386 - RNA, 20 nt, synthetic construct
  source 1..20: mol_type = other RNA
gcccagtatttccagaccag

SEQ ID NO: 16387 - RNA, 20 nt, synthetic construct
  source 1..20: mol_type = other RNA
gcccatcataagtttttctg

SEQ ID NO: 16388 - RNA, 20 nt, synthetic construct
  source 1..20: mol_type = other RNA
gcccatgctggtctggaaat

SEQ ID NO: 16389 - RNA, 20 nt, synthetic construct
  source 1..20: mol_type = other RNA
gccgtaacaccacctgaggg

SEQ ID NO: 16390 - RNA, 20 nt, synthetic construct
  source 1..20: mol_type = other RNA
gccgtgttaacttgcacgaa

SEQ ID NO: 16391 - RNA, 20 nt, synthetic construct
  source 1..20: mol_type = other RNA
gcctagaacacagagacaca

SEQ ID NO: 16392 - RNA, 20 nt, synthetic construct
  source 1..20: mol_type = other RNA
gcctttctccactccctcag

SEQ ID NO: 16393 - RNA, 20 nt, synthetic construct
  source 1..20: mol_type = other RNA
gctaaatgaaatcaaagaaa

SEQ ID NO: 16394 - RNA, 20 nt, synthetic construct
  source 1..20: mol_type = other RNA
gctaacaaacttcagaaaaa

SEQ ID NO: 16395 - RNA, 20 nt, synthetic construct
  source 1..20: mol_type = other RNA
gctaattttacttttttatg

SEQ ID NO: 16396 - RNA, 20 nt, synthetic construct
  source 1..20: mol_type = other RNA
gctatggtgactacctgttt

SEQ ID NO: 16397 - RNA, 20 nt, synthetic construct
  source 1..20: mol_type = other RNA
gctcaagcaattcttttacc

SEQ ID NO: 16398 - RNA, 20 nt, synthetic construct
  source 1..20: mol_type = other RNA
gctcatttctttgatttcat

SEQ ID NO: 16399 - RNA, 20 nt, synthetic construct
  source 1..20: mol_type = other RNA
gctcctcattttttgtcact

SEQ ID NO: 16400 - RNA, 20 nt, synthetic construct
  source 1..20: mol_type = other RNA
gctcgttgaaggaacaatgg

SEQ ID NO: 16401 - RNA, 20 nt, synthetic construct
  source 1..20: mol_type = other RNA
gctctcaatgctgtgttcct

SEQ ID NO: 16402 - RNA, 20 nt, synthetic construct
  source 1..20: mol_type = other RNA
gctctttaccatgtgctcgt

SEQ ID NO: 16403 - RNA, 20 nt, synthetic construct
  source 1..20: mol_type = other RNA
gctgcttgtgacattgaagg

SEQ ID NO: 16404 - RNA, 20 nt, synthetic construct
  source 1..20: mol_type = other RNA
gctggtctggaaatactggg

SEQ ID NO: 16405 - RNA, 20 nt, synthetic construct
  source 1..20: mol_type = other RNA
gctgtattataaactacaca

SEQ ID NO: 16406 - RNA, 20 nt, synthetic construct
  source 1..20: mol_type = other RNA
gctgtgttcctctggtactc

SEQ ID NO: 16407 - RNA, 20 nt, synthetic construct
  source 1..20: mol_type = other RNA
gcttaatgattaactatgtt

SEQ ID NO: 16408 - RNA, 20 nt, synthetic construct
  source 1..20: mol_type = other RNA
gcttagtaacaattttgata

SEQ ID NO: 16409 - RNA, 20 nt, synthetic construct
  source 1..20: mol_type = other RNA
gcttcagagagaaagtgttt

SEQ ID NO: 16410 - RNA, 20 nt, synthetic construct
  source 1..20: mol_type = other RNA
gcttccagaagaaaacagtt

SEQ ID NO: 16411 - RNA, 20 nt, synthetic construct
  source 1..20: mol_type = other RNA
gcttgagcccagtatttcca

SEQ ID NO: 16412 - RNA, 20 nt, synthetic construct
  source 1..20: mol_type = other RNA
gcttgcccatcataagtttt

SEQ ID NO: 16413 - RNA, 20 nt, synthetic construct
  source 1..20: mol_type = other RNA
gcttgtgacattgaaggtat

SEQ ID NO: 16414 - RNA, 20 nt, synthetic construct
  source 1..20: mol_type = other RNA
gcttttaaaaacaggtagtc

SEQ ID NO: 16415 - RNA, 20 nt, synthetic construct
  source 1..20: mol_type = other RNA
ggaaaaaagtaatgaattaa

SEQ ID NO: 16416 - RNA, 20 nt, synthetic construct
  source 1..20: mol_type = other RNA
ggaaacagtgatccattcca

SEQ ID NO: 16417 - RNA, 20 nt, synthetic construct
  source 1..20: mol_type = other RNA
ggaaatactgggctcaagca

SEQ ID NO: 16418 - RNA, 20 nt, synthetic construct
  source 1..20: mol_type = other RNA
ggaacaatggatatgtggtc

SEQ ID NO: 16419 - RNA, 20 nt, synthetic construct
  source 1..20: mol_type = other RNA
ggaacacagcattgagagcc

SEQ ID NO: 16420 - RNA, 20 nt, synthetic construct
  source 1..20: mol_type = other RNA
ggaactgttttcttctggaa

SEQ ID NO: 16421 - RNA, 20 nt, synthetic construct
  source 1..20: mol_type = other RNA
ggaagaaggttacattcgtg

SEQ ID NO: 16422 - RNA, 20 nt, synthetic construct
  source 1..20: mol_type = other RNA
ggaagcagacctagacttct

SEQ ID NO: 16423 - RNA, 20 nt, synthetic construct
  source 1..20: mol_type = other RNA
ggaatggatcactgtttcca

SEQ ID NO: 16424 - RNA, 20 nt, synthetic construct
  source 1..20: mol_type = other RNA
ggaccaaactagaattgaat

SEQ ID NO: 16425 - RNA, 20 nt, synthetic construct
  source 1..20: mol_type = other RNA
ggagaaaagggagtgaaatg

SEQ ID NO: 16426 - RNA, 20 nt, synthetic construct
  source 1..20: mol_type = other RNA
ggagaaaggcttcagagaga

SEQ ID NO: 16427 - RNA, 20 nt, synthetic construct
  source 1..20: mol_type = other RNA
ggagattaataacatttttt

SEQ ID NO: 16428 - RNA, 20 nt, synthetic construct
  source 1..20: mol_type = other RNA
ggagcatataattatacatt

SEQ ID NO: 16429 - RNA, 20 nt, synthetic construct
  source 1..20: mol_type = other RNA
ggaggccaaggtaaaagaat

SEQ ID NO: 16430 - RNA, 20 nt, synthetic construct
  source 1..20: mol_type = other RNA
ggagtgaaatgtctttaatg

SEQ ID NO: 16431 - RNA, 20 nt, synthetic construct
  source 1..20: mol_type = other RNA
ggagtggagaaaggcttcag

SEQ ID NO: 16432 - RNA, 20 nt, synthetic construct
  source 1..20: mol_type = other RNA
ggatatgtggtcatctagga

SEQ ID NO: 16433 - RNA, 20 nt, synthetic construct
  source 1..20: mol_type = other RNA
ggatcactgtttccaaaaga

SEQ ID NO: 16434 - RNA, 20 nt, synthetic construct
  source 1..20: mol_type = other RNA
ggatggttaagacatataag

SEQ ID NO: 16435 - RNA, 20 nt, synthetic construct
  source 1..20: mol_type = other RNA
ggattttgtgacaatataca

SEQ ID NO: 16436 - RNA, 20 nt, synthetic construct
  source 1..20: mol_type = other RNA
ggcaaatattggtatatata

SEQ ID NO: 16437 - RNA, 20 nt, synthetic construct
  source 1..20: mol_type = other RNA
ggcaagctgcttgtgacatt

SEQ ID NO: 16438 - RNA, 20 nt, synthetic construct
  source 1..20: mol_type = other RNA
ggcaatacattaagacatca

SEQ ID NO: 16439 - RNA, 20 nt, synthetic construct
  source 1..20: mol_type = other RNA
ggccaaggtaaaagaattgc

SEQ ID NO: 16440 - RNA, 20 nt, synthetic construct
  source 1..20: mol_type = other RNA
ggctcaagcaattcttttac

SEQ ID NO: 16441 - RNA, 20 nt, synthetic construct
  source 1..20: mol_type = other RNA
ggctctcaatgctgtgttcc

SEQ ID NO: 16442 - RNA, 20 nt, synthetic construct
  source 1..20: mol_type = other RNA
ggctctttaccatgtgctcg

SEQ ID NO: 16443 - RNA, 20 nt, synthetic construct
  source 1..20: mol_type = other RNA
ggcttaatgattaactatgt

SEQ ID NO: 16444 - RNA, 20 nt, synthetic construct
  source 1..20: mol_type = other RNA
ggcttcagagagaaagtgtt

SEQ ID NO: 16445 - RNA, 20 nt, synthetic construct
  source 1..20: mol_type = other RNA
gggaaaaaagtaatgaatta

SEQ ID NO: 16446 - RNA, 20 nt, synthetic construct
  source 1..20: mol_type = other RNA
gggaggccaaggtaaaagaa

SEQ ID NO: 16447 - RNA, 20 nt, synthetic construct
  source 1..20: mol_type = other RNA
gggagtgaaatgtctttaat

SEQ ID NO: 16448 - RNA, 20 nt, synthetic construct
  source 1..20: mol_type = other RNA
gggagtggagaaaggcttca

SEQ ID NO: 16449 - RNA, 20 nt, synthetic construct
  source 1..20: mol_type = other RNA
gggattttgtgacaatatac

SEQ ID NO: 16450 - RNA, 20 nt, synthetic construct
  source 1..20: mol_type = other RNA
gggcaaatattggtatatat

SEQ ID NO: 16451 - RNA, 20 nt, synthetic construct
  source 1..20: mol_type = other RNA
gggcaagctgcttgtgacat

SEQ ID NO: 16452 - RNA, 20 nt, synthetic construct
  source 1..20: mol_type = other RNA
gggcaatacattaagacatc

SEQ ID NO: 16453 - RNA, 20 nt, synthetic construct
  source 1..20: mol_type = other RNA
gggctcaagcaattctttta

SEQ ID NO: 16454 - RNA, 20 nt, synthetic construct
  source 1..20: mol_type = other RNA
ggggaaaaaagtaatgaatt

SEQ ID NO: 16455 - RNA, 20 nt, synthetic construct
  source 1..20: mol_type = other RNA
gggtaaatttattattaaag

SEQ ID NO: 16456 - RNA, 20 nt, synthetic construct
  source 1..20: mol_type = other RNA
ggtaaaagaattgcttgagc

SEQ ID NO: 16457 - RNA, 20 nt, synthetic construct
  source 1..20: mol_type = other RNA
ggtaaagagcctagaacaca

SEQ ID NO: 16458 - RNA, 20 nt, synthetic construct
  source 1..20: mol_type = other RNA
ggtaaggttggtaggtgaac

SEQ ID NO: 16459 - RNA, 20 nt, synthetic construct
  source 1..20: mol_type = other RNA
ggtaatttgaaattgtattt

SEQ ID NO: 16460 - RNA, 20 nt, synthetic construct
  source 1..20: mol_type = other RNA
ggtactctgtataaatcaat

SEQ ID NO: 16461 - RNA, 20 nt, synthetic construct
  source 1..20: mol_type = other RNA
ggtaggtgaacatagttaat

SEQ ID NO: 16462 - RNA, 20 nt, synthetic construct
  source 1..20: mol_type = other RNA
ggtagtcaccatagcattga

SEQ ID NO: 16463 - RNA, 20 nt, synthetic construct
  source 1..20: mol_type = other RNA
ggtatatatagagttaagaa

SEQ ID NO: 16464 - RNA, 20 nt, synthetic construct
  source 1..20: mol_type = other RNA
ggtatttaagattcaattct

SEQ ID NO: 16465 - RNA, 20 nt, synthetic construct
  source 1..20: mol_type = other RNA
ggtcatctaggaccaaacta

SEQ ID NO: 16466 - RNA, 20 nt, synthetic construct
  source 1..20: mol_type = other RNA
ggtcctagatgaccacatat

SEQ ID NO: 16467 - RNA, 20 nt, synthetic construct
  source 1..20: mol_type = other RNA
ggtctgcttccagaagaaaa

SEQ ID NO: 16468 - RNA, 20 nt, synthetic construct
  source 1..20: mol_type = other RNA
ggtctggaaatactgggctc

SEQ ID NO: 16469 - RNA, 20 nt, synthetic construct
  source 1..20: mol_type = other RNA
ggtgaacatagttaatcatt

SEQ ID NO: 16470 - RNA, 20 nt, synthetic construct
  source 1..20: mol_type = other RNA
ggtgactacctgtttttaaa

SEQ ID NO: 16471 - RNA, 20 nt, synthetic construct
  source 1..20: mol_type = other RNA
ggtggtgttacggctctcaa

SEQ ID NO: 16472 - RNA, 20 nt, synthetic construct
  source 1..20: mol_type = other RNA
ggtgttacggctctcaatgc

SEQ ID NO: 16473 - RNA, 20 nt, synthetic construct
  source 1..20: mol_type = other RNA
ggttaagacatataaggtga

SEQ ID NO: 16474 - RNA, 20 nt, synthetic construct
  source 1..20: mol_type = other RNA
ggttacattcgtgcaagtta

SEQ ID NO: 16475 - RNA, 20 nt, synthetic construct
  source 1..20: mol_type = other RNA
ggttggtaggtgaacatagt

SEQ ID NO: 16476 - RNA, 20 nt, synthetic construct
  source 1..20: mol_type = other RNA
gtaaaagaattgcttgagcc

SEQ ID NO: 16477 - RNA, 20 nt, synthetic construct
  source 1..20: mol_type = other RNA
gtaaagagcctagaacacag

SEQ ID NO: 16478 - RNA, 20 nt, synthetic construct
  source 1..20: mol_type = other RNA
gtaaatctcttaaaatcata

SEQ ID NO: 16479 - RNA, 20 nt, synthetic construct
  source 1..20: mol_type = other RNA
gtaacaccacctgagggagt

SEQ ID NO: 16480 - RNA, 20 nt, synthetic construct
  source 1..20: mol_type = other RNA
gtaaccttcttccacattga

SEQ ID NO: 16481 - RNA, 20 nt, synthetic construct
  source 1..20: mol_type = other RNA
gtaaggttggtaggtgaaca

SEQ ID NO: 16482 - RNA, 20 nt, synthetic construct
  source 1..20: mol_type = other RNA
gtaagtgtcattaaagacat

SEQ ID NO: 16483 - RNA, 20 nt, synthetic construct
  source 1..20: mol_type = other RNA
gtaatgaattaagtatgcat

SEQ ID NO: 16484 - RNA, 20 nt, synthetic construct
  source 1..20: mol_type = other RNA
gtacagtttgagaaatgcat

SEQ ID NO: 16485 - RNA, 20 nt, synthetic construct
  source 1..20: mol_type = other RNA
gtaccagaggaacacagcat

SEQ ID NO: 16486 - RNA, 20 nt, synthetic construct
  source 1..20: mol_type = other RNA
gtactctgtataaatcaatg

SEQ ID NO: 16487 - RNA, 20 nt, synthetic construct
  source 1..20: mol_type = other RNA
gtactttagttcttttggaa

SEQ ID NO: 16488 - RNA, 20 nt, synthetic construct
  source 1..20: mol_type = other RNA
gtaggtgaacatagttaatc

SEQ ID NO: 16489 - RNA, 20 nt, synthetic construct
  source 1..20: mol_type = other RNA
gtagtcaccatagcattgaa

SEQ ID NO: 16490 - RNA, 20 nt, synthetic construct
  source 1..20: mol_type = other RNA
gtagtttataatacagcaaa

SEQ ID NO: 16491 - RNA, 20 nt, synthetic construct
  source 1..20: mol_type = other RNA
gtataattatatgctcctca

SEQ ID NO: 16492 - RNA, 20 nt, synthetic construct
  source 1..20: mol_type = other RNA
gtatatatagagttaagaag

SEQ ID NO: 16493 - RNA, 20 nt, synthetic construct
  source 1..20: mol_type = other RNA
gtatattgtcacaaaatccc

SEQ ID NO: 16494 - RNA, 20 nt, synthetic construct
  source 1..20: mol_type = other RNA
gtatgcatttctcaaactgt

SEQ ID NO: 16495 - RNA, 20 nt, synthetic construct
  source 1..20: mol_type = other RNA
gtattataaactacacattc

SEQ ID NO: 16496 - RNA, 20 nt, synthetic construct
  source 1..20: mol_type = other RNA
gtattgcccatgctggtctg

SEQ ID NO: 16497 - RNA, 20 nt, synthetic construct
  source 1..20: mol_type = other RNA
gtatttaactttgctgtatt

SEQ ID NO: 16498 - RNA, 20 nt, synthetic construct
  source 1..20: mol_type = other RNA
gtatttaagattcaattcta

SEQ ID NO: 16499 - RNA, 20 nt, synthetic construct
  source 1..20: mol_type = other RNA
gtatttccagaccagcatgg

SEQ ID NO: 16500 - RNA, 20 nt, synthetic construct
  source 1..20: mol_type = other RNA
gtcaaaaataaacttttttg

SEQ ID NO: 16501 - RNA, 20 nt, synthetic construct
  source 1..20: mol_type = other RNA
gtcacaaaatcccatatata

SEQ ID NO: 16502 - RNA, 20 nt, synthetic construct
  source 1..20: mol_type = other RNA
gtcacaagcagcttgcccat

SEQ ID NO: 16503 - RNA, 20 nt, synthetic construct
  source 1..20: mol_type = other RNA
gtcaccatagcattgaatgt

SEQ ID NO: 16504 - RNA, 20 nt, synthetic construct
  source 1..20: mol_type = other RNA
gtcactataattgttaatat

SEQ ID NO: 16505 - RNA, 20 nt, synthetic construct
  source 1..20: mol_type = other RNA
gtcatctaggaccaaactag

SEQ ID NO: 16506 - RNA, 20 nt, synthetic construct
  source 1..20: mol_type = other RNA
gtcattaaagacatttcact

SEQ ID NO: 16507 - RNA, 20 nt, synthetic construct
  source 1..20: mol_type = other RNA
gtcctagatgaccacatatc

SEQ ID NO: 16508 - RNA, 20 nt, synthetic construct
  source 1..20: mol_type = other RNA
gtctaggtctgcttccagaa

SEQ ID NO: 16509 - RNA, 20 nt, synthetic construct
  source 1..20: mol_type = other RNA
gtctctgtgttctaggctct

SEQ ID NO: 16510 - RNA, 20 nt, synthetic construct
  source 1..20: mol_type = other RNA
gtctgcttccagaagaaaac

SEQ ID NO: 16511 - RNA, 20 nt, synthetic construct
  source 1..20: mol_type = other RNA
gtctggaaatactgggctca

SEQ ID NO: 16512 - RNA, 20 nt, synthetic construct
  source 1..20: mol_type = other RNA
gtcttaaccatccttgtata

SEQ ID NO: 16513 - RNA, 20 nt, synthetic construct
  source 1..20: mol_type = other RNA
gtcttaatgtattgcccatg

SEQ ID NO: 16514 - RNA, 20 nt, synthetic construct
  source 1..20: mol_type = other RNA
gtctttaatgacacttacta

SEQ ID NO: 16515 - RNA, 20 nt, synthetic construct
  source 1..20: mol_type = other RNA
gtgaaatgtctttaatgaca

SEQ ID NO: 16516 - RNA, 20 nt, synthetic construct
  source 1..20: mol_type = other RNA
gtgaacatagttaatcatta

SEQ ID NO: 16517 - RNA, 20 nt, synthetic construct
  source 1..20: mol_type = other RNA
gtgacaaaaaatgaggagca

SEQ ID NO: 16518 - RNA, 20 nt, synthetic construct
  source 1..20: mol_type = other RNA
gtgacaatatacaaggatgg

SEQ ID NO: 16519 - RNA, 20 nt, synthetic construct
  source 1..20: mol_type = other RNA
gtgacattgaaggtatttaa

SEQ ID NO: 16520 - RNA, 20 nt, synthetic construct
  source 1..20: mol_type = other RNA
gtgactacctgtttttaaaa

SEQ ID NO: 16521 - RNA, 20 nt, synthetic construct
  source 1..20: mol_type = other RNA
gtgatccattccaaaaaaca

SEQ ID NO: 16522 - RNA, 20 nt, synthetic construct
  source 1..20: mol_type = other RNA
gtgcaagttaacacggctta

SEQ ID NO: 16523 - RNA, 20 nt, synthetic construct
  source 1..20: mol_type = other RNA
gtgctcgttgaaggaacaat

SEQ ID NO: 16524 - RNA, 20 nt, synthetic construct
  source 1..20: mol_type = other RNA
gtggaactgttttcttctgg

SEQ ID NO: 16525 - RNA, 20 nt, synthetic construct
  source 1..20: mol_type = other RNA
gtggaagaaggttacattcg

SEQ ID NO: 16526 - RNA, 20 nt, synthetic construct
  source 1..20: mol_type = other RNA
gtggagaaaagggagtgaaa

SEQ ID NO: 16527 - RNA, 20 nt, synthetic construct
  source 1..20: mol_type = other RNA
gtggagaaaggcttcagaga

SEQ ID NO: 16528 - RNA, 20 nt, synthetic construct
  source 1..20: mol_type = other RNA
gtggtcatctaggaccaaac

SEQ ID NO: 16529 - RNA, 20 nt, synthetic construct
  source 1..20: mol_type = other RNA
gtggtgttacggctctcaat

SEQ ID NO: 16530 - RNA, 20 nt, synthetic construct
  source 1..20: mol_type = other RNA
gtgtagtttataatacagca

SEQ ID NO: 16531 - RNA, 20 nt, synthetic construct
  source 1..20: mol_type = other RNA
gtgtcattaaagacatttca

SEQ ID NO: 16532 - RNA, 20 nt, synthetic construct
  source 1..20: mol_type = other RNA
gtgtctctgtgttctaggct

SEQ ID NO: 16533 - RNA, 20 nt, synthetic construct
  source 1..20: mol_type = other RNA
gtgttaacttgcacgaatgt

SEQ ID NO: 16534 - RNA, 20 nt, synthetic construct
  source 1..20: mol_type = other RNA
gtgttacggctctcaatgct

SEQ ID NO: 16535 - RNA, 20 nt, synthetic construct
  source 1..20: mol_type = other RNA
gtgttcctctggtactctgt

SEQ ID NO: 16536 - RNA, 20 nt, synthetic construct
  source 1..20: mol_type = other RNA
gtgttctaggctctttacca

SEQ ID NO: 16537 - RNA, 20 nt, synthetic construct
  source 1..20: mol_type = other RNA
gtgttctgtgtctctgtgtt

SEQ ID NO: 16538 - RNA, 20 nt, synthetic construct
  source 1..20: mol_type = other RNA
gtgttttttggaatggatca

SEQ ID NO: 16539 - RNA, 20 nt, synthetic construct
  source 1..20: mol_type = other RNA
gttaacacggcttaatgatt

SEQ ID NO: 16540 - RNA, 20 nt, synthetic construct
  source 1..20: mol_type = other RNA
gttaacttgcacgaatgtaa

SEQ ID NO: 16541 - RNA, 20 nt, synthetic construct
  source 1..20: mol_type = other RNA
gttaagaagtctaggtctgc

SEQ ID NO: 16542 - RNA, 20 nt, synthetic construct
  source 1..20: mol_type = other RNA
gttaagacatataaggtgat

SEQ ID NO: 16543 - RNA, 20 nt, synthetic construct
  source 1..20: mol_type = other RNA
gttaatcattaagccgtgtt

SEQ ID NO: 16544 - RNA, 20 nt, synthetic construct
  source 1..20: mol_type = other RNA
gttacattcgtgcaagttaa

SEQ ID NO: 16545 - RNA, 20 nt, synthetic construct
  source 1..20: mol_type = other RNA
gttacggctctcaatgctgt

SEQ ID NO: 16546 - RNA, 20 nt, synthetic construct
  source 1..20: mol_type = other RNA
gttactaagctaacaaactt

SEQ ID NO: 16547 - RNA, 20 nt, synthetic construct
  source 1..20: mol_type = other RNA
gttagatcaatgctaaatga

SEQ ID NO: 16548 - RNA, 20 nt, synthetic construct
  source 1..20: mol_type = other RNA
gttagcttagtaacaatttt

SEQ ID NO: 16549 - RNA, 20 nt, synthetic construct
  source 1..20: mol_type = other RNA
gttagttgctcatttctttg

SEQ ID NO: 16550 - RNA, 20 nt, synthetic construct
  source 1..20: mol_type = other RNA
gttattaatctcctcttttt

SEQ ID NO: 16551 - RNA, 20 nt, synthetic construct
  source 1..20: mol_type = other RNA
gttcacctaccaaccttacc

SEQ ID NO: 16552 - RNA, 20 nt, synthetic construct
  source 1..20: mol_type = other RNA
gttccacgttgcttgaaatt

SEQ ID NO: 16553 - RNA, 20 nt, synthetic construct
  source 1..20: mol_type = other RNA
gttcctctggtactctgtat

SEQ ID NO: 16554 - RNA, 20 nt, synthetic construct
  source 1..20: mol_type = other RNA
gttccttcaacgagcacatg

SEQ ID NO: 16555 - RNA, 20 nt, synthetic construct
  source 1..20: mol_type = other RNA
gttctaggctctttaccatg

SEQ ID NO: 16556 - RNA, 20 nt, synthetic construct
  source 1..20: mol_type = other RNA
gttctgtgtctctgtgttct

SEQ ID NO: 16557 - RNA, 20 nt, synthetic construct
  source 1..20: mol_type = other RNA
gttcttttggaaacagtgat

SEQ ID NO: 16558 - RNA, 20 nt, synthetic construct
  source 1..20: mol_type = other RNA
gttgaaggaacaatggatat

SEQ ID NO: 16559 - RNA, 20 nt, synthetic construct
  source 1..20: mol_type = other RNA
gttgaggggaaaaaagtaat

SEQ ID NO: 16560 - RNA, 20 nt, synthetic construct
  source 1..20: mol_type = other RNA
gttgctcatttctttgattt

SEQ ID NO: 16561 - RNA, 20 nt, synthetic construct
  source 1..20: mol_type = other RNA
gttgcttgaaattgaaaatc

SEQ ID NO: 16562 - RNA, 20 nt, synthetic construct
  source 1..20: mol_type = other RNA
gttgggtaaatttattatta

SEQ ID NO: 16563 - RNA, 20 nt, synthetic construct
  source 1..20: mol_type = other RNA
gttggtaggtgaacatagtt

SEQ ID NO: 16564 - RNA, 20 nt, synthetic construct
  source 1..20: mol_type = other RNA
gtttataatacagcaaagtt

SEQ ID NO: 16565 - RNA, 20 nt, synthetic construct
  source 1..20: mol_type = other RNA
gtttatttttgacttgtaaa

SEQ ID NO: 16566 - RNA, 20 nt, synthetic construct
  source 1..20: mol_type = other RNA
gtttccaaaagaactaaagt

SEQ ID NO: 16567 - RNA, 20 nt, synthetic construct
  source 1..20: mol_type = other RNA
gtttgagaaatgcatactta

SEQ ID NO: 16568 - RNA, 20 nt, synthetic construct
  source 1..20: mol_type = other RNA
gtttggtcctagatgaccac

SEQ ID NO: 16569 - RNA, 20 nt, synthetic construct
  source 1..20: mol_type = other RNA
gtttgttagcttagtaacaa

SEQ ID NO: 16570 - RNA, 20 nt, synthetic construct
  source 1..20: mol_type = other RNA
gttttcttctggaagcagac

SEQ ID NO: 16571 - RNA, 20 nt, synthetic construct
  source 1..20: mol_type = other RNA
gtttttctgaagtttgttag

SEQ ID NO: 16572 - RNA, 20 nt, synthetic construct
  source 1..20: mol_type = other RNA
gttttttggaatggatcact

SEQ ID NO: 16573 - RNA, 20 nt, synthetic construct
  source 1..20: mol_type = other RNA
taaaaacaggtagtcaccat

SEQ ID NO: 16574 - RNA, 20 nt, synthetic construct
  source 1..20: mol_type = other RNA
taaaagaattgcttgagccc

SEQ ID NO: 16575 - RNA, 20 nt, synthetic construct
  source 1..20: mol_type = other RNA
taaactacacattcaatgct

SEQ ID NO: 16576 - RNA, 20 nt, synthetic construct
  source 1..20: mol_type = other RNA
taaacttttttgttgggtaa

SEQ ID NO: 16577 - RNA, 20 nt, synthetic construct
  source 1..20: mol_type = other RNA
taaagacatttcactccctt

SEQ ID NO: 16578 - RNA, 20 nt, synthetic construct
  source 1..20: mol_type = other RNA
taaagagcctagaacacaga

SEQ ID NO: 16579 - RNA, 20 nt, synthetic construct
  source 1..20: mol_type = other RNA
taaagatgatgtcttaatgt

SEQ ID NO: 16580 - RNA, 20 nt, synthetic construct
  source 1..20: mol_type = other RNA
taaagtacagtttgagaaat

SEQ ID NO: 16581 - RNA, 20 nt, synthetic construct
  source 1..20: mol_type = other RNA
taaagttgaggggaaaaaag

SEQ ID NO: 16582 - RNA, 20 nt, synthetic construct
  source 1..20: mol_type = other RNA
taaataccttcaatgtcaca

SEQ ID NO: 16583 - RNA, 20 nt, synthetic construct
  source 1..20: mol_type = other RNA
taaatgaaatcaaagaaatg

SEQ ID NO: 16584 - RNA, 20 nt, synthetic construct
  source 1..20: mol_type = other RNA
taaatttacccaacaaaaaa

SEQ ID NO: 16585 - RNA, 20 nt, synthetic construct
  source 1..20: mol_type = other RNA
taacaaaaagaggagattaa

SEQ ID NO: 16586 - RNA, 20 nt, synthetic construct
  source 1..20: mol_type = other RNA
taacaaacttcagaaaaact

SEQ ID NO: 16587 - RNA, 20 nt, synthetic construct
  source 1..20: mol_type = other RNA
taacaattatagtgacaaaa

SEQ ID NO: 16588 - RNA, 20 nt, synthetic construct
  source 1..20: mol_type = other RNA
taacaccacctgagggagtg

SEQ ID NO: 16589 - RNA, 20 nt, synthetic construct
  source 1..20: mol_type = other RNA
taacacggcttaatgattaa

SEQ ID NO: 16590 - RNA, 20 nt, synthetic construct
  source 1..20: mol_type = other RNA
taaccatccttgtatattgt

SEQ ID NO: 16591 - RNA, 20 nt, synthetic construct
  source 1..20: mol_type = other RNA
taaccttcttccacattgag

SEQ ID NO: 16592 - RNA, 20 nt, synthetic construct
  source 1..20: mol_type = other RNA
taactatgttcacctaccaa

SEQ ID NO: 16593 - RNA, 20 nt, synthetic construct
  source 1..20: mol_type = other RNA
taactcaatgtggaagaagg

SEQ ID NO: 16594 - RNA, 20 nt, synthetic construct
  source 1..20: mol_type = other RNA
taactctatatataccaata

SEQ ID NO: 16595 - RNA, 20 nt, synthetic construct
  source 1..20: mol_type = other RNA
taacttaataggtaatttga

SEQ ID NO: 16596 - RNA, 20 nt, synthetic construct
  source 1..20: mol_type = other RNA
taacttgcacgaatgtaacc

SEQ ID NO: 16597 - RNA, 20 nt, synthetic construct
  source 1..20: mol_type = other RNA
taactttgctgtattataaa

SEQ ID NO: 16598 - RNA, 20 nt, synthetic construct
  source 1..20: mol_type = other RNA
taagaagtctaggtctgctt

SEQ ID NO: 16599 - RNA, 20 nt, synthetic construct
  source 1..20: mol_type = other RNA
taagacatataaggtgatgc

SEQ ID NO: 16600 - RNA, 20 nt, synthetic construct
  source 1..20: mol_type = other RNA
taagacatcatctttaaaaa

SEQ ID NO: 16601 - RNA, 20 nt, synthetic construct
  source 1..20: mol_type = other RNA
taagagatttacaagtcaaa

SEQ ID NO: 16602 - RNA, 20 nt, synthetic construct
  source 1..20: mol_type = other RNA
taagattcaattctagtttg

SEQ ID NO: 16603 - RNA, 20 nt, synthetic construct
  source 1..20: mol_type = other RNA
taagccgtgttaacttgcac

SEQ ID NO: 16604 - RNA, 20 nt, synthetic construct
  source 1..20: mol_type = other RNA
taagctaacaaacttcagaa

SEQ ID NO: 16605 - RNA, 20 nt, synthetic construct
  source 1..20: mol_type = other RNA
taaggttggtaggtgaacat

SEQ ID NO: 16606 - RNA, 20 nt, synthetic construct
  source 1..20: mol_type = other RNA
taagtatgcatttctcaaac

SEQ ID NO: 16607 - RNA, 20 nt, synthetic construct
  source 1..20: mol_type = other RNA
taagtgtcattaaagacatt

SEQ ID NO: 16608 - RNA, 20 nt, synthetic construct
  source 1..20: mol_type = other RNA
taagttagttgctcatttct

SEQ ID NO: 16609 - RNA, 20 nt, synthetic construct
  source 1..20: mol_type = other RNA
taagtttttctgaagtttgt

SEQ ID NO: 16610 - RNA, 20 nt, synthetic construct
  source 1..20: mol_type = other RNA
taataaatttacccaacaaa

SEQ ID NO: 16611 - RNA, 20 nt, synthetic construct
  source 1..20: mol_type = other RNA
taataataaatttacccaac

SEQ ID NO: 16612 - RNA, 20 nt, synthetic construct
  source 1..20: mol_type = other RNA
taatacagcaaagttaaata

SEQ ID NO: 16613 - RNA, 20 nt, synthetic construct
  source 1..20: mol_type = other RNA
taataggtaatttgaaattg

SEQ ID NO: 16614 - RNA, 20 nt, synthetic construct
  source 1..20: mol_type = other RNA
taatcattaagccgtgttaa

SEQ ID NO: 16615 - RNA, 20 nt, synthetic construct
  source 1..20: mol_type = other RNA
taatctcctctttttgttaa

SEQ ID NO: 16616 - RNA, 20 nt, synthetic construct
  source 1..20: mol_type = other RNA
taatgaattaagtatgcatt

SEQ ID NO: 16617 - RNA, 20 nt, synthetic construct
  source 1..20: mol_type = other RNA
taatgacacttactatatat

SEQ ID NO: 16618 - RNA, 20 nt, synthetic construct
  source 1..20: mol_type = other RNA
taatgattaactatgttcac

SEQ ID NO: 16619 - RNA, 20 nt, synthetic construct
  source 1..20: mol_type = other RNA
taatgtattgcccatgctgg

SEQ ID NO: 16620 - RNA, 20 nt, synthetic construct
  source 1..20: mol_type = other RNA
taattatatgctcctcattt

SEQ ID NO: 16621 - RNA, 20 nt, synthetic construct
  source 1..20: mol_type = other RNA
taattcattacttttttccc

SEQ ID NO: 16622 - RNA, 20 nt, synthetic construct
  source 1..20: mol_type = other RNA
tacaaggatggttaagacat

SEQ ID NO: 16623 - RNA, 20 nt, synthetic construct
  source 1..20: mol_type = other RNA
tacaagtcaaaaataaactt

SEQ ID NO: 16624 - RNA, 20 nt, synthetic construct
  source 1..20: mol_type = other RNA
tacaatttcaaattacctat

SEQ ID NO: 16625 - RNA, 20 nt, synthetic construct
  source 1..20: mol_type = other RNA
tacacattcaatgctatggt

SEQ ID NO: 16626 - RNA, 20 nt, synthetic construct
  source 1..20: mol_type = other RNA
tacagagtaccagaggaaca

SEQ ID NO: 16627 - RNA, 20 nt, synthetic construct
  source 1..20: mol_type = other RNA
tacagcaaagttaaatacaa

SEQ ID NO: 16628 - RNA, 20 nt, synthetic construct
  source 1..20: mol_type = other RNA
tacagtttgagaaatgcata

SEQ ID NO: 16629 - RNA, 20 nt, synthetic construct
  source 1..20: mol_type = other RNA
tacattaagacatcatcttt

SEQ ID NO: 16630 - RNA, 20 nt, synthetic construct
  source 1..20: mol_type = other RNA
tacattcgtgcaagttaaca

SEQ ID NO: 16631 - RNA, 20 nt, synthetic construct
  source 1..20: mol_type = other RNA
tacattgatttatacagagt

SEQ ID NO: 16632 - RNA, 20 nt, synthetic construct
  source 1..20: mol_type = other RNA
tacatttaacaaaaagagga

SEQ ID NO: 16633 - RNA, 20 nt, synthetic construct
  source 1..20: mol_type = other RNA
taccaaccttaccttttctg

SEQ ID NO: 16634 - RNA, 20 nt, synthetic construct
  source 1..20: mol_type = other RNA
taccaatatttgcccagaaa

SEQ ID NO: 16635 - RNA, 20 nt, synthetic construct
  source 1..20: mol_type = other RNA
taccagaggaacacagcatt

SEQ ID NO: 16636 - RNA, 20 nt, synthetic construct
  source 1..20: mol_type = other RNA
taccatgtgctcgttgaagg

SEQ ID NO: 16637 - RNA, 20 nt, synthetic construct
  source 1..20: mol_type = other RNA
tacccaacaaaaaagtttat

SEQ ID NO: 16638 - RNA, 20 nt, synthetic construct
  source 1..20: mol_type = other RNA
tacctattaagttagttgct

SEQ ID NO: 16639 - RNA, 20 nt, synthetic construct
  source 1..20: mol_type = other RNA
tacctgtttttaaaagctaa

SEQ ID NO: 16640 - RNA, 20 nt, synthetic construct
  source 1..20: mol_type = other RNA
taccttcaatgtcacaagca

SEQ ID NO: 16641 - RNA, 20 nt, synthetic construct
  source 1..20: mol_type = other RNA
taccttttctgggcaaatat

SEQ ID NO: 16642 - RNA, 20 nt, synthetic construct
  source 1..20: mol_type = other RNA
tacggctctcaatgctgtgt

SEQ ID NO: 16643 - RNA, 20 nt, synthetic construct
  source 1..20: mol_type = other RNA
tactaagctaacaaacttca

SEQ ID NO: 16644 - RNA, 20 nt, synthetic construct
  source 1..20: mol_type = other RNA
tactatatatgggattttgt

SEQ ID NO: 16645 - RNA, 20 nt, synthetic construct
  source 1..20: mol_type = other RNA
tactctgtataaatcaatgt

SEQ ID NO: 16646 - RNA, 20 nt, synthetic construct
  source 1..20: mol_type = other RNA
tactgggctcaagcaattct

SEQ ID NO: 16647 - RNA, 20 nt, synthetic construct
  source 1..20: mol_type = other RNA
tactttagttcttttggaaa

SEQ ID NO: 16648 - RNA, 20 nt, synthetic construct
  source 1..20: mol_type = other RNA
tacttttttcccctcaactt

SEQ ID NO: 16649 - RNA, 20 nt, synthetic construct
  source 1..20: mol_type = other RNA
tagaacacagagacacagaa

SEQ ID NO: 16650 - RNA, 20 nt, synthetic construct
  source 1..20: mol_type = other RNA
tagaattgaatcttaaatac

SEQ ID NO: 16651 - RNA, 20 nt, synthetic construct
  source 1..20: mol_type = other RNA
tagacttcttaactctatat

SEQ ID NO: 16652 - RNA, 20 nt, synthetic construct
  source 1..20: mol_type = other RNA
tagagttaagaagtctaggt

SEQ ID NO: 16653 - RNA, 20 nt, synthetic construct
  source 1..20: mol_type = other RNA
tagatcaatgctaaatgaaa

SEQ ID NO: 16654 - RNA, 20 nt, synthetic construct
  source 1..20: mol_type = other RNA
tagatgaccacatatccatt

SEQ ID NO: 16655 - RNA, 20 nt, synthetic construct
  source 1..20: mol_type = other RNA
tagcattgaatgtgtagttt

SEQ ID NO: 16656 - RNA, 20 nt, synthetic construct
  source 1..20: mol_type = other RNA
tagcattgatctaactcaat

SEQ ID NO: 16657 - RNA, 20 nt, synthetic construct
  source 1..20: mol_type = other RNA
tagcttagtaacaattttga

SEQ ID NO: 16658 - RNA, 20 nt, synthetic construct
  source 1..20: mol_type = other RNA
tagcttttaaaaacaggtag

SEQ ID NO: 16659 - RNA, 20 nt, synthetic construct
  source 1..20: mol_type = other RNA
taggaccaaactagaattga

SEQ ID NO: 16660 - RNA, 20 nt, synthetic construct
  source 1..20: mol_type = other RNA
taggctctttaccatgtgct

SEQ ID NO: 16661 - RNA, 20 nt, synthetic construct
  source 1..20: mol_type = other RNA
taggtaatttgaaattgtat

SEQ ID NO: 16662 - RNA, 20 nt, synthetic construct
  source 1..20: mol_type = other RNA
taggtctgcttccagaagaa

SEQ ID NO: 16663 - RNA, 20 nt, synthetic construct
  source 1..20: mol_type = other RNA
taggtgaacatagttaatca

SEQ ID NO: 16664 - RNA, 20 nt, synthetic construct
  source 1..20: mol_type = other RNA
tagtaagtgtcattaaagac

SEQ ID NO: 16665 - RNA, 20 nt, synthetic construct
  source 1..20: mol_type = other RNA
tagtcaccatagcattgaat

SEQ ID NO: 16666 - RNA, 20 nt, synthetic construct
  source 1..20: mol_type = other RNA
tagtgacaaaaaatgaggag

SEQ ID NO: 16667 - RNA, 20 nt, synthetic construct
  source 1..20: mol_type = other RNA
tagttaatcattaagccgtg

SEQ ID NO: 16668 - RNA, 20 nt, synthetic construct
  source 1..20: mol_type = other RNA
tagttcttttggaaacagtg

SEQ ID NO: 16669 - RNA, 20 nt, synthetic construct
  source 1..20: mol_type = other RNA
tagttgctcatttctttgat

SEQ ID NO: 16670 - RNA, 20 nt, synthetic construct
  source 1..20: mol_type = other RNA
tagtttataatacagcaaag

SEQ ID NO: 16671 - RNA, 20 nt, synthetic construct
  source 1..20: mol_type = other RNA
tagtttggtcctagatgacc

SEQ ID NO: 16672 - RNA, 20 nt, synthetic construct
  source 1..20: mol_type = other RNA
tataaactacacattcaatg

SEQ ID NO: 16673 - RNA, 20 nt, synthetic construct
  source 1..20: mol_type = other RNA
tataatacagcaaagttaaa

SEQ ID NO: 16674 - RNA, 20 nt, synthetic construct
  source 1..20: mol_type = other RNA
tataattatatgctcctcat

SEQ ID NO: 16675 - RNA, 20 nt, synthetic construct
  source 1..20: mol_type = other RNA
tatacaaggatggttaagac

SEQ ID NO: 16676 - RNA, 20 nt, synthetic construct
  source 1..20: mol_type = other RNA
tatacagagtaccagaggaa

SEQ ID NO: 16677 - RNA, 20 nt, synthetic construct
  source 1..20: mol_type = other RNA
tatacattgatttatacaga

SEQ ID NO: 16678 - RNA, 20 nt, synthetic construct
  source 1..20: mol_type = other RNA
tatacatttaacaaaaagag

SEQ ID NO: 16679 - RNA, 20 nt, synthetic construct
  source 1..20: mol_type = other RNA
tataccaatatttgcccaga

SEQ ID NO: 16680 - RNA, 20 nt, synthetic construct
  source 1..20: mol_type = other RNA
tatagagttaagaagtctag

SEQ ID NO: 16681 - RNA, 20 nt, synthetic construct
  source 1..20: mol_type = other RNA
tatagtaagtgtcattaaag

SEQ ID NO: 16682 - RNA, 20 nt, synthetic construct
  source 1..20: mol_type = other RNA
tatagtgacaaaaaatgagg

SEQ ID NO: 16683 - RNA, 20 nt, synthetic construct
  source 1..20: mol_type = other RNA
tatataccaatatttgccca

SEQ ID NO: 16684 - RNA, 20 nt, synthetic construct
  source 1..20: mol_type = other RNA
tatatagagttaagaagtct

SEQ ID NO: 16685 - RNA, 20 nt, synthetic construct
  source 1..20: mol_type = other RNA
tatatagtaagtgtcattaa

SEQ ID NO: 16686 - RNA, 20 nt, synthetic construct
  source 1..20: mol_type = other RNA
tatatataccaatatttgcc

SEQ ID NO: 16687 - RNA, 20 nt, synthetic construct
  source 1..20: mol_type = other RNA
tatatatagagttaagaagt

SEQ ID NO: 16688 - RNA, 20 nt, synthetic construct
  source 1..20: mol_type = other RNA
tatatatgggattttgtgac

SEQ ID NO: 16689 - RNA, 20 nt, synthetic construct
  source 1..20: mol_type = other RNA
tatatgctcctcattttttg

SEQ ID NO: 16690 - RNA, 20 nt, synthetic construct
  source 1..20: mol_type = other RNA
tatatgggattttgtgacaa

SEQ ID NO: 16691 - RNA, 20 nt, synthetic construct
  source 1..20: mol_type = other RNA
tatatgtcttaaccatcctt

SEQ ID NO: 16692 - RNA, 20 nt, synthetic construct
  source 1..20: mol_type = other RNA
tatattgtcacaaaatccca

SEQ ID NO: 16693 - RNA, 20 nt, synthetic construct
  source 1..20: mol_type = other RNA
tatcaaaattgttactaagc

SEQ ID NO: 16694 - RNA, 20 nt, synthetic construct
  source 1..20: mol_type = other RNA
tatccattgttccttcaacg

SEQ ID NO: 16695 - RNA, 20 nt, synthetic construct
  source 1..20: mol_type = other RNA
tatcttgattttcaatttca

SEQ ID NO: 16696 - RNA, 20 nt, synthetic construct
  source 1..20: mol_type = other RNA
tatgatgggcaagctgcttg

SEQ ID NO: 16697 - RNA, 20 nt, synthetic construct
  source 1..20: mol_type = other RNA
tatgattttaagagatttac

SEQ ID NO: 16698 - RNA, 20 nt, synthetic construct
  source 1..20: mol_type = other RNA
tatgcatttctcaaactgta

SEQ ID NO: 16699 - RNA, 20 nt, synthetic construct
  source 1..20: mol_type = other RNA
tatgctcctcattttttgtc

SEQ ID NO: 16700 - RNA, 20 nt, synthetic construct
  source 1..20: mol_type = other RNA
tatgggattttgtgacaata

SEQ ID NO: 16701 - RNA, 20 nt, synthetic construct
  source 1..20: mol_type = other RNA
tatggtgactacctgttttt

SEQ ID NO: 16702 - RNA, 20 nt, synthetic construct
  source 1..20: mol_type = other RNA
tatgtcttaaccatccttgt

SEQ ID NO: 16703 - RNA, 20 nt, synthetic construct
  source 1..20: mol_type = other RNA
tatgtggtcatctaggacca

SEQ ID NO: 16704 - RNA, 20 nt, synthetic construct
  source 1..20: mol_type = other RNA
tatgttcacctaccaacctt

SEQ ID NO: 16705 - RNA, 20 nt, synthetic construct
  source 1..20: mol_type = other RNA
tattaaagttgaggggaaaa

SEQ ID NO: 16706 - RNA, 20 nt, synthetic construct
  source 1..20: mol_type = other RNA
tattaacaattatagtgaca

SEQ ID NO: 16707 - RNA, 20 nt, synthetic construct
  source 1..20: mol_type = other RNA
tattaagttagttgctcatt

SEQ ID NO: 16708 - RNA, 20 nt, synthetic construct
  source 1..20: mol_type = other RNA
tattaatctcctctttttgt

SEQ ID NO: 16709 - RNA, 20 nt, synthetic construct
  source 1..20: mol_type = other RNA
tattataaactacacattca

SEQ ID NO: 16710 - RNA, 20 nt, synthetic construct
  source 1..20: mol_type = other RNA
tattattaaagttgagggga

SEQ ID NO: 16711 - RNA, 20 nt, synthetic construct
  source 1..20: mol_type = other RNA
tattgcccatgctggtctgg

SEQ ID NO: 16712 - RNA, 20 nt, synthetic construct
  source 1..20: mol_type = other RNA
tattggtatatatagagtta

SEQ ID NO: 16713 - RNA, 20 nt, synthetic construct
  source 1..20: mol_type = other RNA
tattgtcacaaaatcccata

SEQ ID NO: 16714 - RNA, 20 nt, synthetic construct
  source 1..20: mol_type = other RNA
tatttaactttgctgtatta

SEQ ID NO: 16715 - RNA, 20 nt, synthetic construct
  source 1..20: mol_type = other RNA
tatttaagattcaattctag

SEQ ID NO: 16716 - RNA, 20 nt, synthetic construct
  source 1..20: mol_type = other RNA
tatttccagaccagcatggg

SEQ ID NO: 16717 - RNA, 20 nt, synthetic construct
  source 1..20: mol_type = other RNA
tatttgcccagaaaaggtaa

SEQ ID NO: 16718 - RNA, 20 nt, synthetic construct
  source 1..20: mol_type = other RNA
tatttttgacttgtaaatct

SEQ ID NO: 16719 - RNA, 20 nt, synthetic construct
  source 1..20: mol_type = other RNA
tcaaaattgttactaagcta

SEQ ID NO: 16720 - RNA, 20 nt, synthetic construct
  source 1..20: mol_type = other RNA
tcaaactgtactttagttct

SEQ ID NO: 16721 - RNA, 20 nt, synthetic construct
  source 1..20: mol_type = other RNA
tcaaagaaatgagcaactaa

SEQ ID NO: 16722 - RNA, 20 nt, synthetic construct
  source 1..20: mol_type = other RNA
tcaaattacctattaagtta

SEQ ID NO: 16723 - RNA, 20 nt, synthetic construct
  source 1..20: mol_type = other RNA
tcaacgagcacatggtaaag

SEQ ID NO: 16724 - RNA, 20 nt, synthetic construct
  source 1..20: mol_type = other RNA
tcaagcaacgtggaactgtt

SEQ ID NO: 16725 - RNA, 20 nt, synthetic construct
  source 1..20: mol_type = other RNA
tcaagcaattcttttacctt

SEQ ID NO: 16726 - RNA, 20 nt, synthetic construct
  source 1..20: mol_type = other RNA
tcaatgctaaatgaaatcaa

SEQ ID NO: 16727 - RNA, 20 nt, synthetic construct
  source 1..20: mol_type = other RNA
tcaatgctatggtgactacc

SEQ ID NO: 16728 - RNA, 20 nt, synthetic construct
  source 1..20: mol_type = other RNA
tcaatgctgtgttcctctgg

SEQ ID NO: 16729 - RNA, 20 nt, synthetic construct
  source 1..20: mol_type = other RNA
tcaatgtataattatatgct

SEQ ID NO: 16730 - RNA, 20 nt, synthetic construct
  source 1..20: mol_type = other RNA
tcaatgtcacaagcagcttg

SEQ ID NO: 16731 - RNA, 20 nt, synthetic construct
  source 1..20: mol_type = other RNA
tcaatgtggaagaaggttac

SEQ ID NO: 16732 - RNA, 20 nt, synthetic construct
  source 1..20: mol_type = other RNA
tcaattctagtttggtccta

SEQ ID NO: 16733 - RNA, 20 nt, synthetic construct
  source 1..20: mol_type = other RNA
tcaatttcaagcaacgtgga

SEQ ID NO: 16734 - RNA, 20 nt, synthetic construct
  source 1..20: mol_type = other RNA
tcacaaaatcccatatatag

SEQ ID NO: 16735 - RNA, 20 nt, synthetic construct
  source 1..20: mol_type = other RNA
tcacaagcagcttgcccatc

SEQ ID NO: 16736 - RNA, 20 nt, synthetic construct
  source 1..20: mol_type = other RNA
tcaccatagcattgaatgtg

SEQ ID NO: 16737 - RNA, 20 nt, synthetic construct
  source 1..20: mol_type = other RNA
tcacctaccaaccttacctt

SEQ ID NO: 16738 - RNA, 20 nt, synthetic construct
  source 1..20: mol_type = other RNA
tcaccttatatgtcttaacc

SEQ ID NO: 16739 - RNA, 20 nt, synthetic construct
  source 1..20: mol_type = other RNA
tcactataattgttaatatg

SEQ ID NO: 16740 - RNA, 20 nt, synthetic construct
  source 1..20: mol_type = other RNA
tcactcccttttctccactg

SEQ ID NO: 16741 - RNA, 20 nt, synthetic construct
  source 1..20: mol_type = other RNA
tcactgtttccaaaagaact

SEQ ID NO: 16742 - RNA, 20 nt, synthetic construct
  source 1..20: mol_type = other RNA
tcagaaaaacttatgatggg

SEQ ID NO: 16743 - RNA, 20 nt, synthetic construct
  source 1..20: mol_type = other RNA
tcagagagaaagtgtttttt

SEQ ID NO: 16744 - RNA, 20 nt, synthetic construct
  source 1..20: mol_type = other RNA
tcaggtggtgttacggctct

SEQ ID NO: 16745 - RNA, 20 nt, synthetic construct
  source 1..20: mol_type = other RNA
tcataagtttttctgaagtt

SEQ ID NO: 16746 - RNA, 20 nt, synthetic construct
  source 1..20: mol_type = other RNA
tcatctaggaccaaactaga

SEQ ID NO: 16747 - RNA, 20 nt, synthetic construct
  source 1..20: mol_type = other RNA
tcattaaagacatttcactc

SEQ ID NO: 16748 - RNA, 20 nt, synthetic construct
  source 1..20: mol_type = other RNA
tcattaagccgtgttaactt

SEQ ID NO: 16749 - RNA, 20 nt, synthetic construct
  source 1..20: mol_type = other RNA
tcattacttttttcccctca

SEQ ID NO: 16750 - RNA, 20 nt, synthetic construct
  source 1..20: mol_type = other RNA
tcatttagcattgatctaac

SEQ ID NO: 16751 - RNA, 20 nt, synthetic construct
  source 1..20: mol_type = other RNA
tcatttctttgatttcattt

SEQ ID NO: 16752 - RNA, 20 nt, synthetic construct
  source 1..20: mol_type = other RNA
tcattttttgtcactataat

SEQ ID NO: 16753 - RNA, 20 nt, synthetic construct
  source 1..20: mol_type = other RNA
tccaaaaaacactttctctc

SEQ ID NO: 16754 - RNA, 20 nt, synthetic construct
  source 1..20: mol_type = other RNA
tccaaaagaactaaagtaca

SEQ ID NO: 16755 - RNA, 20 nt, synthetic construct
  source 1..20: mol_type = other RNA
tccacattgagttagatcaa

SEQ ID NO: 16756 - RNA, 20 nt, synthetic construct
  source 1..20: mol_type = other RNA
tccacgttgcttgaaattga

SEQ ID NO: 16757 - RNA, 20 nt, synthetic construct
  source 1..20: mol_type = other RNA
tccactccctcaggtggtgt

SEQ ID NO: 16758 - RNA, 20 nt, synthetic construct
  source 1..20: mol_type = other RNA
tccactgtgttctgtgtctc

SEQ ID NO: 16759 - RNA, 20 nt, synthetic construct
  source 1..20: mol_type = other RNA
tccagaagaaaacagttcca

SEQ ID NO: 16760 - RNA, 20 nt, synthetic construct
  source 1..20: mol_type = other RNA
tccagaccagcatgggcaat

SEQ ID NO: 16761 - RNA, 20 nt, synthetic construct
  source 1..20: mol_type = other RNA
tccattccaaaaaacacttt

SEQ ID NO: 16762 - RNA, 20 nt, synthetic construct
  source 1..20: mol_type = other RNA
tccattgttccttcaacgag

SEQ ID NO: 16763 - RNA, 20 nt, synthetic construct
  source 1..20: mol_type = other RNA
tcccatatatagtaagtgtc

SEQ ID NO: 16764 - RNA, 20 nt, synthetic construct
  source 1..20: mol_type = other RNA
tcccctcaactttaataata

SEQ ID NO: 16765 - RNA, 20 nt, synthetic construct
  source 1..20: mol_type = other RNA
tccctcaggtggtgttacgg

SEQ ID NO: 16766 - RNA, 20 nt, synthetic construct
  source 1..20: mol_type = other RNA
tcccttttctccactgtgtt

SEQ ID NO: 16767 - RNA, 20 nt, synthetic construct
  source 1..20: mol_type = other RNA
tcctagatgaccacatatcc

SEQ ID NO: 16768 - RNA, 20 nt, synthetic construct
  source 1..20: mol_type = other RNA
tcctcattttttgtcactat

SEQ ID NO: 16769 - RNA, 20 nt, synthetic construct
  source 1..20: mol_type = other RNA
tcctctggtactctgtataa

SEQ ID NO: 16770 - RNA, 20 nt, synthetic construct
  source 1..20: mol_type = other RNA
tcctctttttgttaaatgta

SEQ ID NO: 16771 - RNA, 20 nt, synthetic construct
  source 1..20: mol_type = other RNA
tccttcaacgagcacatggt

SEQ ID NO: 16772 - RNA, 20 nt, synthetic construct
  source 1..20: mol_type = other RNA
tccttgtatattgtcacaaa

SEQ ID NO: 16773 - RNA, 20 nt, synthetic construct
  source 1..20: mol_type = other RNA
tcgtgcaagttaacacggct

SEQ ID NO: 16774 - RNA, 20 nt, synthetic construct
  source 1..20: mol_type = other RNA
tcgttgaaggaacaatggat

SEQ ID NO: 16775 - RNA, 20 nt, synthetic construct
  source 1..20: mol_type = other RNA
tctaactcaatgtggaagaa

SEQ ID NO: 16776 - RNA, 20 nt, synthetic construct
  source 1..20: mol_type = other RNA
tctaggaccaaactagaatt

SEQ ID NO: 16777 - RNA, 20 nt, synthetic construct
  source 1..20: mol_type = other RNA
tctaggctctttaccatgtg

SEQ ID NO: 16778 - RNA, 20 nt, synthetic construct
  source 1..20: mol_type = other RNA
tctaggtctgcttccagaag

SEQ ID NO: 16779 - RNA, 20 nt, synthetic construct
  source 1..20: mol_type = other RNA
tctagtttggtcctagatga

SEQ ID NO: 16780 - RNA, 20 nt, synthetic construct
  source 1..20: mol_type = other RNA
tctatatataccaatatttg

SEQ ID NO: 16781 - RNA, 20 nt, synthetic construct
  source 1..20: mol_type = other RNA
tctcaaactgtactttagtt

SEQ ID NO: 16782 - RNA, 20 nt, synthetic construct
  source 1..20: mol_type = other RNA
tctcaatgctgtgttcctct

SEQ ID NO: 16783 - RNA, 20 nt, synthetic construct
  source 1..20: mol_type = other RNA
tctccactccctcaggtggt

SEQ ID NO: 16784 - RNA, 20 nt, synthetic construct
  source 1..20: mol_type = other RNA
tctccactgtgttctgtgtc

SEQ ID NO: 16785 - RNA, 20 nt, synthetic construct
  source 1..20: mol_type = other RNA
tctcctctttttgttaaatg

SEQ ID NO: 16786 - RNA, 20 nt, synthetic construct
  source 1..20: mol_type = other RNA
tctctctgaagcctttctcc

SEQ ID NO: 16787 - RNA, 20 nt, synthetic construct
  source 1..20: mol_type = other RNA
tctctgaagcctttctccac

SEQ ID NO: 16788 - RNA, 20 nt, synthetic construct
  source 1..20: mol_type = other RNA
tctctgtgttctaggctctt

SEQ ID NO: 16789 - RNA, 20 nt, synthetic construct
  source 1..20: mol_type = other RNA
tctgaagcctttctccactc

SEQ ID NO: 16790 - RNA, 20 nt, synthetic construct
  source 1..20: mol_type = other RNA
tctgaagtttgttagcttag

SEQ ID NO: 16791 - RNA, 20 nt, synthetic construct
  source 1..20: mol_type = other RNA
tctgcttccagaagaaaaca

SEQ ID NO: 16792 - RNA, 20 nt, synthetic construct
  source 1..20: mol_type = other RNA
tctggaaatactgggctcaa

SEQ ID NO: 16793 - RNA, 20 nt, synthetic construct
  source 1..20: mol_type = other RNA
tctggaagcagacctagact

SEQ ID NO: 16794 - RNA, 20 nt, synthetic construct
  source 1..20: mol_type = other RNA
tctgggcaaatattggtata

SEQ ID NO: 16795 - RNA, 20 nt, synthetic construct
  source 1..20: mol_type = other RNA
tctggtactctgtataaatc

SEQ ID NO: 16796 - RNA, 20 nt, synthetic construct
  source 1..20: mol_type = other RNA
tctgtataaatcaatgtata

SEQ ID NO: 16797 - RNA, 20 nt, synthetic construct
  source 1..20: mol_type = other RNA
tctgtgtctctgtgttctag

SEQ ID NO: 16798 - RNA, 20 nt, synthetic construct
  source 1..20: mol_type = other RNA
tctgtgttctaggctcttta

SEQ ID NO: 16799 - RNA, 20 nt, synthetic construct
  source 1..20: mol_type = other RNA
tcttaaataccttcaatgtc

SEQ ID NO: 16800 - RNA, 20 nt, synthetic construct
  source 1..20: mol_type = other RNA
tcttaaccatccttgtatat

SEQ ID NO: 16801 - RNA, 20 nt, synthetic construct
  source 1..20: mol_type = other RNA
tcttaactctatatatacca

SEQ ID NO: 16802 - RNA, 20 nt, synthetic construct
  source 1..20: mol_type = other RNA
tcttaatgtattgcccatgc

SEQ ID NO: 16803 - RNA, 20 nt, synthetic construct
  source 1..20: mol_type = other RNA
tcttccacattgagttagat

SEQ ID NO: 16804 - RNA, 20 nt, synthetic construct
  source 1..20: mol_type = other RNA
tcttctggaagcagacctag

SEQ ID NO: 16805 - RNA, 20 nt, synthetic construct
  source 1..20: mol_type = other RNA
tcttgattttcaatttcaag

SEQ ID NO: 16806 - RNA, 20 nt, synthetic construct
  source 1..20: mol_type = other RNA
tctttaatgacacttactat

SEQ ID NO: 16807 - RNA, 20 nt, synthetic construct
  source 1..20: mol_type = other RNA
tctttaccatgtgctcgttg

SEQ ID NO: 16808 - RNA, 20 nt, synthetic construct
  source 1..20: mol_type = other RNA
tctttgatttcatttagcat

SEQ ID NO: 16809 - RNA, 20 nt, synthetic construct
  source 1..20: mol_type = other RNA
tcttttggaaacagtgatcc

SEQ ID NO: 16810 - RNA, 20 nt, synthetic construct
  source 1..20: mol_type = other RNA
tgaaatcaaagaaatgagca

SEQ ID NO: 16811 - RNA, 20 nt, synthetic construct
  source 1..20: mol_type = other RNA
tgaaatgtctttaatgacac

SEQ ID NO: 16812 - RNA, 20 nt, synthetic construct
  source 1..20: mol_type = other RNA
tgaaattgtatttaactttg

SEQ ID NO: 16813 - RNA, 20 nt, synthetic construct
  source 1..20: mol_type = other RNA
tgaacatagttaatcattaa

SEQ ID NO: 16814 - RNA, 20 nt, synthetic construct
  source 1..20: mol_type = other RNA
tgaagcctttctccactccc

SEQ ID NO: 16815 - RNA, 20 nt, synthetic construct
  source 1..20: mol_type = other RNA
tgaaggaacaatggatatgt

SEQ ID NO: 16816 - RNA, 20 nt, synthetic construct
  source 1..20: mol_type = other RNA
tgaaggtatttaagattcaa

SEQ ID NO: 16817 - RNA, 20 nt, synthetic construct
  source 1..20: mol_type = other RNA
tgaagtttgttagcttagta

SEQ ID NO: 16818 - RNA, 20 nt, synthetic construct
  source 1..20: mol_type = other RNA
tgaatcttaaataccttcaa

SEQ ID NO: 16819 - RNA, 20 nt, synthetic construct
  source 1..20: mol_type = other RNA
tgaatgtgtagtttataata

SEQ ID NO: 16820 - RNA, 20 nt, synthetic construct
  source 1..20: mol_type = other RNA
tgaattaagtatgcatttct

SEQ ID NO: 16821 - RNA, 20 nt, synthetic construct
  source 1..20: mol_type = other RNA
tgacaaaaaatgaggagcat

SEQ ID NO: 16822 - RNA, 20 nt, synthetic construct
  source 1..20: mol_type = other RNA
tgacaatatacaaggatggt

SEQ ID NO: 16823 - RNA, 20 nt, synthetic construct
  source 1..20: mol_type = other RNA
tgacacttactatatatggg

SEQ ID NO: 16824 - RNA, 20 nt, synthetic construct
  source 1..20: mol_type = other RNA
tgacattgaaggtatttaag

SEQ ID NO: 16825 - RNA, 20 nt, synthetic construct
  source 1..20: mol_type = other RNA
tgaccacatatccattgttc

SEQ ID NO: 16826 - RNA, 20 nt, synthetic construct
  source 1..20: mol_type = other RNA
tgactacctgtttttaaaag

SEQ ID NO: 16827 - RNA, 20 nt, synthetic construct
  source 1..20: mol_type = other RNA
tgacttgtaaatctcttaaa

SEQ ID NO: 16828 - RNA, 20 nt, synthetic construct
  source 1..20: mol_type = other RNA
tgagaaatgcatacttaatt

SEQ ID NO: 16829 - RNA, 20 nt, synthetic construct
  source 1..20: mol_type = other RNA
tgagagccgtaacaccacct

SEQ ID NO: 16830 - RNA, 20 nt, synthetic construct
  source 1..20: mol_type = other RNA
tgagcaactaacttaatagg

SEQ ID NO: 16831 - RNA, 20 nt, synthetic construct
  source 1..20: mol_type = other RNA
tgagcccagtatttccagac

SEQ ID NO: 16832 - RNA, 20 nt, synthetic construct
  source 1..20: mol_type = other RNA
tgaggagcatataattatac

SEQ ID NO: 16833 - RNA, 20 nt, synthetic construct
  source 1..20: mol_type = other RNA
tgagggagtggagaaaggct

SEQ ID NO: 16834 - RNA, 20 nt, synthetic construct
  source 1..20: mol_type = other RNA
tgaggggaaaaaagtaatga

SEQ ID NO: 16835 - RNA, 20 nt, synthetic construct
  source 1..20: mol_type = other RNA
tgagttagatcaatgctaaa

SEQ ID NO: 16836 - RNA, 20 nt, synthetic construct
  source 1..20: mol_type = other RNA
tgatccattccaaaaaacac

SEQ ID NO: 16837 - RNA, 20 nt, synthetic construct
  source 1..20: mol_type = other RNA
tgatctaactcaatgtggaa

SEQ ID NO: 16838 - RNA, 20 nt, synthetic construct
  source 1..20: mol_type = other RNA
tgatgggcaagctgcttgtg

SEQ ID NO: 16839 - RNA, 20 nt, synthetic construct
  source 1..20: mol_type = other RNA
tgatgtcttaatgtattgcc

SEQ ID NO: 16840 - RNA, 20 nt, synthetic construct
  source 1..20: mol_type = other RNA
tgattaactatgttcaccta

SEQ ID NO: 16841 - RNA, 20 nt, synthetic construct
  source 1..20: mol_type = other RNA
tgatttatacagagtaccag

SEQ ID NO: 16842 - RNA, 20 nt, synthetic construct
  source 1..20: mol_type = other RNA
tgatttcatttagcattgat

SEQ ID NO: 16843 - RNA, 20 nt, synthetic construct
  source 1..20: mol_type = other RNA
tgattttaagagatttacaa

SEQ ID NO: 16844 - RNA, 20 nt, synthetic construct
  source 1..20: mol_type = other RNA
tgattttcaatttcaagcaa

SEQ ID NO: 16845 - RNA, 20 nt, synthetic construct
  source 1..20: mol_type = other RNA
tgcaagttaacacggcttaa

SEQ ID NO: 16846 - RNA, 20 nt, synthetic construct
  source 1..20: mol_type = other RNA
tgcacgaatgtaaccttctt

SEQ ID NO: 16847 - RNA, 20 nt, synthetic construct
  source 1..20: mol_type = other RNA
tgcatacttaattcattact

SEQ ID NO: 16848 - RNA, 20 nt, synthetic construct
  source 1..20: mol_type = other RNA
tgcatcaccttatatgtctt

SEQ ID NO: 16849 - RNA, 20 nt, synthetic construct
  source 1..20: mol_type = other RNA
tgcatttctcaaactgtact

SEQ ID NO: 16850 - RNA, 20 nt, synthetic construct
  source 1..20: mol_type = other RNA
tgcccagaaaaggtaaggtt

SEQ ID NO: 16851 - RNA, 20 nt, synthetic construct
  source 1..20: mol_type = other RNA
tgcccatcataagtttttct

SEQ ID NO: 16852 - RNA, 20 nt, synthetic construct
  source 1..20: mol_type = other RNA
tgcccatgctggtctggaaa

SEQ ID NO: 16853 - RNA, 20 nt, synthetic construct
  source 1..20: mol_type = other RNA
tgctaaatgaaatcaaagaa

SEQ ID NO: 16854 - RNA, 20 nt, synthetic construct
  source 1..20: mol_type = other RNA
tgctatggtgactacctgtt

SEQ ID NO: 16855 - RNA, 20 nt, synthetic construct
  source 1..20: mol_type = other RNA
tgctcatttctttgatttca

SEQ ID NO: 16856 - RNA, 20 nt, synthetic construct
  source 1..20: mol_type = other RNA
tgctcctcattttttgtcac

SEQ ID NO: 16857 - RNA, 20 nt, synthetic construct
  source 1..20: mol_type = other RNA
tgctcgttgaaggaacaatg

SEQ ID NO: 16858 - RNA, 20 nt, synthetic construct
  source 1..20: mol_type = other RNA
tgctggtctggaaatactgg

SEQ ID NO: 16859 - RNA, 20 nt, synthetic construct
  source 1..20: mol_type = other RNA
tgctgtattataaactacac

SEQ ID NO: 16860 - RNA, 20 nt, synthetic construct
  source 1..20: mol_type = other RNA
tgctgtgttcctctggtact

SEQ ID NO: 16861 - RNA, 20 nt, synthetic construct
  source 1..20: mol_type = other RNA
tgcttccagaagaaaacagt

SEQ ID NO: 16862 - RNA, 20 nt, synthetic construct
  source 1..20: mol_type = other RNA
tgcttgagcccagtatttcc

SEQ ID NO: 16863 - RNA, 20 nt, synthetic construct
  source 1..20: mol_type = other RNA
tgcttgtgacattgaaggta

SEQ ID NO: 16864 - RNA, 20 nt, synthetic construct
  source 1..20: mol_type = other RNA
tggaaacagtgatccattcc

SEQ ID NO: 16865 - RNA, 20 nt, synthetic construct
  source 1..20: mol_type = other RNA
tggaaatactgggctcaagc

SEQ ID NO: 16866 - RNA, 20 nt, synthetic construct
  source 1..20: mol_type = other RNA
tggaactgttttcttctgga

SEQ ID NO: 16867 - RNA, 20 nt, synthetic construct
  source 1..20: mol_type = other RNA
tggaagaaggttacattcgt

SEQ ID NO: 16868 - RNA, 20 nt, synthetic construct
  source 1..20: mol_type = other RNA
tggaagcagacctagacttc

SEQ ID NO: 16869 - RNA, 20 nt, synthetic construct
  source 1..20: mol_type = other RNA
tggaatggatcactgtttcc

SEQ ID NO: 16870 - RNA, 20 nt, synthetic construct
  source 1..20: mol_type = other RNA
tggagaaaagggagtgaaat

SEQ ID NO: 16871 - RNA, 20 nt, synthetic construct
  source 1..20: mol_type = other RNA
tggagaaaggcttcagagag

SEQ ID NO: 16872 - RNA, 20 nt, synthetic construct
  source 1..20: mol_type = other RNA
tggatatgtggtcatctagg

SEQ ID NO: 16873 - RNA, 20 nt, synthetic construct
  source 1..20: mol_type = other RNA
tggatcactgtttccaaaag

SEQ ID NO: 16874 - RNA, 20 nt, synthetic construct
  source 1..20: mol_type = other RNA
tgggaggccaaggtaaaaga

SEQ ID NO: 16875 - RNA, 20 nt, synthetic construct
  source 1..20: mol_type = other RNA
tgggattttgtgacaatata

SEQ ID NO: 16876 - RNA, 20 nt, synthetic construct
  source 1..20: mol_type = other RNA
tgggcaaatattggtatata

SEQ ID NO: 16877 - RNA, 20 nt, synthetic construct
  source 1..20: mol_type = other RNA
tgggcaagctgcttgtgaca

SEQ ID NO: 16878 - RNA, 20 nt, synthetic construct
  source 1..20: mol_type = other RNA
tgggcaatacattaagacat

SEQ ID NO: 16879 - RNA, 20 nt, synthetic construct
  source 1..20: mol_type = other RNA
tgggctcaagcaattctttt

SEQ ID NO: 16880 - RNA, 20 nt, synthetic construct
  source 1..20: mol_type = other RNA
tggtaaagagcctagaacac

SEQ ID NO: 16881 - RNA, 20 nt, synthetic construct
  source 1..20: mol_type = other RNA
tggtactctgtataaatcaa

SEQ ID NO: 16882 - RNA, 20 nt, synthetic construct
  source 1..20: mol_type = other RNA
tggtaggtgaacatagttaa

SEQ ID NO: 16883 - RNA, 20 nt, synthetic construct
  source 1..20: mol_type = other RNA
tggtatatatagagttaaga

SEQ ID NO: 16884 - RNA, 20 nt, synthetic construct
  source 1..20: mol_type = other RNA
tggtcatctaggaccaaact

SEQ ID NO: 16885 - RNA, 20 nt, synthetic construct
  source 1..20: mol_type = other RNA
tggtcctagatgaccacata

SEQ ID NO: 16886 - RNA, 20 nt, synthetic construct
  source 1..20: mol_type = other RNA
tggtctggaaatactgggct

SEQ ID NO: 16887 - RNA, 20 nt, synthetic construct
  source 1..20: mol_type = other RNA
tggtgactacctgtttttaa

SEQ ID NO: 16888 - RNA, 20 nt, synthetic construct
  source 1..20: mol_type = other RNA
tggtgttacggctctcaatg

SEQ ID NO: 16889 - RNA, 20 nt, synthetic construct
  source 1..20: mol_type = other RNA
tggttaagacatataaggtg

SEQ ID NO: 16890 - RNA, 20 nt, synthetic construct
  source 1..20: mol_type = other RNA
tgtaaatctcttaaaatcat

SEQ ID NO: 16891 - RNA, 20 nt, synthetic construct
  source 1..20: mol_type = other RNA
tgtaaccttcttccacattg

SEQ ID NO: 16892 - RNA, 20 nt, synthetic construct
  source 1..20: mol_type = other RNA
tgtactttagttcttttgga

SEQ ID NO: 16893 - RNA, 20 nt, synthetic construct
  source 1..20: mol_type = other RNA
tgtagtttataatacagcaa

SEQ ID NO: 16894 - RNA, 20 nt, synthetic construct
  source 1..20: mol_type = other RNA
tgtataattatatgctcctc

SEQ ID NO: 16895 - RNA, 20 nt, synthetic construct
  source 1..20: mol_type = other RNA
tgtatattgtcacaaaatcc

SEQ ID NO: 16896 - RNA, 20 nt, synthetic construct
  source 1..20: mol_type = other RNA
tgtattataaactacacatt

SEQ ID NO: 16897 - RNA, 20 nt, synthetic construct
  source 1..20: mol_type = other RNA
tgtattgcccatgctggtct

SEQ ID NO: 16898 - RNA, 20 nt, synthetic construct
  source 1..20: mol_type = other RNA
tgtatttaactttgctgtat

SEQ ID NO: 16899 - RNA, 20 nt, synthetic construct
  source 1..20: mol_type = other RNA
tgtcacaaaatcccatatat

SEQ ID NO: 16900 - RNA, 20 nt, synthetic construct
  source 1..20: mol_type = other RNA
tgtcacaagcagcttgccca

SEQ ID NO: 16901 - RNA, 20 nt, synthetic construct
  source 1..20: mol_type = other RNA
tgtcactataattgttaata

SEQ ID NO: 16902 - RNA, 20 nt, synthetic construct
  source 1..20: mol_type = other RNA
tgtcattaaagacatttcac

SEQ ID NO: 16903 - RNA, 20 nt, synthetic construct
  source 1..20: mol_type = other RNA
tgtctctgtgttctaggctc

SEQ ID NO: 16904 - RNA, 20 nt, synthetic construct
  source 1..20: mol_type = other RNA
tgtcttaaccatccttgtat

SEQ ID NO: 16905 - RNA, 20 nt, synthetic construct
  source 1..20: mol_type = other RNA
tgtcttaatgtattgcccat

SEQ ID NO: 16906 - RNA, 20 nt, synthetic construct
  source 1..20: mol_type = other RNA
tgtctttaatgacacttact

SEQ ID NO: 16907 - RNA, 20 nt, synthetic construct
  source 1..20: mol_type = other RNA
tgtgacaatatacaaggatg

SEQ ID NO: 16908 - RNA, 20 nt, synthetic construct
  source 1..20: mol_type = other RNA
tgtgacattgaaggtattta

SEQ ID NO: 16909 - RNA, 20 nt, synthetic construct
  source 1..20: mol_type = other RNA
tgtgctcgttgaaggaacaa

SEQ ID NO: 16910 - RNA, 20 nt, synthetic construct
  source 1..20: mol_type = other RNA
tgtggaagaaggttacattc

SEQ ID NO: 16911 - RNA, 20 nt, synthetic construct
  source 1..20: mol_type = other RNA
tgtggtcatctaggaccaaa

SEQ ID NO: 16912 - RNA, 20 nt, synthetic construct
  source 1..20: mol_type = other RNA
tgtgtagtttataatacagc

SEQ ID NO: 16913 - RNA, 20 nt, synthetic construct
  source 1..20: mol_type = other RNA
tgtgtctctgtgttctaggc

SEQ ID NO: 16914 - RNA, 20 nt, synthetic construct
  source 1..20: mol_type = other RNA
tgtgttcctctggtactctg

SEQ ID NO: 16915 - RNA, 20 nt, synthetic construct
  source 1..20: mol_type = other RNA
tgtgttctaggctctttacc

SEQ ID NO: 16916 - RNA, 20 nt, synthetic construct
  source 1..20: mol_type = other RNA
tgtgttctgtgtctctgtgt

SEQ ID NO: 16917 - RNA, 20 nt, synthetic construct
  source 1..20: mol_type = other RNA
tgttaacttgcacgaatgta

SEQ ID NO: 16918 - RNA, 20 nt, synthetic construct
  source 1..20: mol_type = other RNA
tgttacggctctcaatgctg

SEQ ID NO: 16919 - RNA, 20 nt, synthetic construct
  source 1..20: mol_type = other RNA
tgttactaagctaacaaact

SEQ ID NO: 16920 - RNA, 20 nt, synthetic construct
  source 1..20: mol_type = other RNA
tgttagcttagtaacaattt

SEQ ID NO: 16921 - RNA, 20 nt, synthetic construct
  source 1..20: mol_type = other RNA
tgttattaatctcctctttt

SEQ ID NO: 16922 - RNA, 20 nt, synthetic construct
  source 1..20: mol_type = other RNA
tgttcacctaccaaccttac

SEQ ID NO: 16923 - RNA, 20 nt, synthetic construct
  source 1..20: mol_type = other RNA
tgttcctctggtactctgta

SEQ ID NO: 16924 - RNA, 20 nt, synthetic construct
  source 1..20: mol_type = other RNA
tgttccttcaacgagcacat

SEQ ID NO: 16925 - RNA, 20 nt, synthetic construct
  source 1..20: mol_type = other RNA
tgttctaggctctttaccat

SEQ ID NO: 16926 - RNA, 20 nt, synthetic construct
  source 1..20: mol_type = other RNA
tgttctgtgtctctgtgttc

SEQ ID NO: 16927 - RNA, 20 nt, synthetic construct
  source 1..20: mol_type = other RNA
tgttgggtaaatttattatt

SEQ ID NO: 16928 - RNA, 20 nt, synthetic construct
  source 1..20: mol_type = other RNA
tgtttccaaaagaactaaag

SEQ ID NO: 16929 - RNA, 20 nt, synthetic construct
  source 1..20: mol_type = other RNA
tgttttcttctggaagcaga

SEQ ID NO: 16930 - RNA, 20 nt, synthetic construct
  source 1..20: mol_type = other RNA
tgttttttggaatggatcac

SEQ ID NO: 16931 - RNA, 20 nt, synthetic construct
  source 1..20: mol_type = other RNA
ttaaaaacaggtagtcacca

SEQ ID NO: 16932 - RNA, 20 nt, synthetic construct
  source 1..20: mol_type = other RNA
ttaaagacatttcactccct

SEQ ID NO: 16933 - RNA, 20 nt, synthetic construct
  source 1..20: mol_type = other RNA
ttaaagatgatgtcttaatg

SEQ ID NO: 16934 - RNA, 20 nt, synthetic construct
  source 1..20: mol_type = other RNA
ttaaagttgaggggaaaaaa

SEQ ID NO: 16935 - RNA, 20 nt, synthetic construct
  source 1..20: mol_type = other RNA
ttaaataccttcaatgtcac

SEQ ID NO: 16936 - RNA, 20 nt, synthetic construct
  source 1..20: mol_type = other RNA
ttaacaaaaagaggagatta

SEQ ID NO: 16937 - RNA, 20 nt, synthetic construct
  source 1..20: mol_type = other RNA
ttaacaattatagtgacaaa

SEQ ID NO: 16938 - RNA, 20 nt, synthetic construct
  source 1..20: mol_type = other RNA
ttaacacggcttaatgatta

SEQ ID NO: 16939 - RNA, 20 nt, synthetic construct
  source 1..20: mol_type = other RNA
ttaaccatccttgtatattg

SEQ ID NO: 16940 - RNA, 20 nt, synthetic construct
  source 1..20: mol_type = other RNA
ttaactatgttcacctacca

SEQ ID NO: 16941 - RNA, 20 nt, synthetic construct
  source 1..20: mol_type = other RNA
ttaactctatatataccaat

SEQ ID NO: 16942 - RNA, 20 nt, synthetic construct
  source 1..20: mol_type = other RNA
ttaacttgcacgaatgtaac

SEQ ID NO: 16943 - RNA, 20 nt, synthetic construct
  source 1..20: mol_type = other RNA
ttaactttgctgtattataa

SEQ ID NO: 16944 - RNA, 20 nt, synthetic construct
  source 1..20: mol_type = other RNA
ttaagaagtctaggtctgct

SEQ ID NO: 16945 - RNA, 20 nt, synthetic construct
  source 1..20: mol_type = other RNA
ttaagacatataaggtgatg

SEQ ID NO: 16946 - RNA, 20 nt, synthetic construct
  source 1..20: mol_type = other RNA
ttaagacatcatctttaaaa

SEQ ID NO: 16947 - RNA, 20 nt, synthetic construct
  source 1..20: mol_type = other RNA
ttaagagatttacaagtcaa

SEQ ID NO: 16948 - RNA, 20 nt, synthetic construct
  source 1..20: mol_type = other RNA
ttaagattcaattctagttt

SEQ ID NO: 16949 - RNA, 20 nt, synthetic construct
  source 1..20: mol_type = other RNA
ttaagccgtgttaacttgca

SEQ ID NO: 16950 - RNA, 20 nt, synthetic construct
  source 1..20: mol_type = other RNA
ttaagtatgcatttctcaaa

SEQ ID NO: 16951 - RNA, 20 nt, synthetic construct
  source 1..20: mol_type = other RNA
ttaagttagttgctcatttc

SEQ ID NO: 16952 - RNA, 20 nt, synthetic construct
  source 1..20: mol_type = other RNA
ttaatcattaagccgtgtta

SEQ ID NO: 16953 - RNA, 20 nt, synthetic construct
  source 1..20: mol_type = other RNA
ttaatctcctctttttgtta

SEQ ID NO: 16954 - RNA, 20 nt, synthetic construct
  source 1..20: mol_type = other RNA
ttaatgacacttactatata

SEQ ID NO: 16955 - RNA, 20 nt, synthetic construct
  source 1..20: mol_type = other RNA
ttaatgattaactatgttca

SEQ ID NO: 16956 - RNA, 20 nt, synthetic construct
  source 1..20: mol_type = other RNA
ttaatgtattgcccatgctg

SEQ ID NO: 16957 - RNA, 20 nt, synthetic construct
  source 1..20: mol_type = other RNA
ttaattcattacttttttcc

SEQ ID NO: 16958 - RNA, 20 nt, synthetic construct
  source 1..20: mol_type = other RNA
ttacaagtcaaaaataaact

SEQ ID NO: 16959 - RNA, 20 nt, synthetic construct
  source 1..20: mol_type = other RNA
ttacattcgtgcaagttaac

SEQ ID NO: 16960 - RNA, 20 nt, synthetic construct
  source 1..20: mol_type = other RNA
ttaccatgtgctcgttgaag

SEQ ID NO: 16961 - RNA, 20 nt, synthetic construct
  source 1..20: mol_type = other RNA
ttacccaacaaaaaagttta

SEQ ID NO: 16962 - RNA, 20 nt, synthetic construct
  source 1..20: mol_type = other RNA
ttacctattaagttagttgc

SEQ ID NO: 16963 - RNA, 20 nt, synthetic construct
  source 1..20: mol_type = other RNA
ttaccttttctgggcaaata

SEQ ID NO: 16964 - RNA, 20 nt, synthetic construct
  source 1..20: mol_type = other RNA
ttacggctctcaatgctgtg

SEQ ID NO: 16965 - RNA, 20 nt, synthetic construct
  source 1..20: mol_type = other RNA
ttactaagctaacaaacttc

SEQ ID NO: 16966 - RNA, 20 nt, synthetic construct
  source 1..20: mol_type = other RNA
ttactatatatgggattttg

SEQ ID NO: 16967 - RNA, 20 nt, synthetic construct
  source 1..20: mol_type = other RNA
ttacttttttcccctcaact

SEQ ID NO: 16968 - RNA, 20 nt, synthetic construct
  source 1..20: mol_type = other RNA
ttagatcaatgctaaatgaa

SEQ ID NO: 16969 - RNA, 20 nt, synthetic construct
  source 1..20: mol_type = other RNA
ttagcattgatctaactcaa

SEQ ID NO: 16970 - RNA, 20 nt, synthetic construct
  source 1..20: mol_type = other RNA
ttagcttagtaacaattttg

SEQ ID NO: 16971 - RNA, 20 nt, synthetic construct
  source 1..20: mol_type = other RNA
ttagcttttaaaaacaggta

SEQ ID NO: 16972 - RNA, 20 nt, synthetic construct
  source 1..20: mol_type = other RNA
ttagttcttttggaaacagt

SEQ ID NO: 16973 - RNA, 20 nt, synthetic construct
  source 1..20: mol_type = other RNA
ttagttgctcatttctttga

SEQ ID NO: 16974 - RNA, 20 nt, synthetic construct
  source 1..20: mol_type = other RNA
ttataaactacacattcaat

SEQ ID NO: 16975 - RNA, 20 nt, synthetic construct
  source 1..20: mol_type = other RNA
ttataatacagcaaagttaa

SEQ ID NO: 16976 - RNA, 20 nt, synthetic construct
  source 1..20: mol_type = other RNA
ttatacagagtaccagagga

SEQ ID NO: 16977 - RNA, 20 nt, synthetic construct
  source 1..20: mol_type = other RNA
ttatacattgatttatacag

SEQ ID NO: 16978 - RNA, 20 nt, synthetic construct
  source 1..20: mol_type = other RNA
ttatagtgacaaaaaatgag

SEQ ID NO: 16979 - RNA, 20 nt, synthetic construct
  source 1..20: mol_type = other RNA
ttatatgctcctcatttttt

SEQ ID NO: 16980 - RNA, 20 nt, synthetic construct
  source 1..20: mol_type = other RNA
ttatatgtcttaaccatcct

SEQ ID NO: 16981 - RNA, 20 nt, synthetic construct
  source 1..20: mol_type = other RNA
ttatcaaaattgttactaag

SEQ ID NO: 16982 - RNA, 20 nt, synthetic construct
  source 1..20: mol_type = other RNA
ttatcttgattttcaatttc

SEQ ID NO: 16983 - RNA, 20 nt, synthetic construct
  source 1..20: mol_type = other RNA
ttatgatgggcaagctgctt

SEQ ID NO: 16984 - RNA, 20 nt, synthetic construct
  source 1..20: mol_type = other RNA
ttattaaagttgaggggaaa

SEQ ID NO: 16985 - RNA, 20 nt, synthetic construct
  source 1..20: mol_type = other RNA
ttattaatctcctctttttg

SEQ ID NO: 16986 - RNA, 20 nt, synthetic construct
  source 1..20: mol_type = other RNA
ttattattaaagttgagggg

SEQ ID NO: 16987 - RNA, 20 nt, synthetic construct
  source 1..20: mol_type = other RNA
ttatttttgacttgtaaatc

SEQ ID NO: 16988 - RNA, 20 nt, synthetic construct
  source 1..20: mol_type = other RNA
ttcaaattacctattaagtt

SEQ ID NO: 16989 - RNA, 20 nt, synthetic construct
  source 1..20: mol_type = other RNA
ttcaacgagcacatggtaaa

SEQ ID NO: 16990 - RNA, 20 nt, synthetic construct
  source 1..20: mol_type = other RNA
ttcaagcaacgtggaactgt

SEQ ID NO: 16991 - RNA, 20 nt, synthetic construct
  source 1..20: mol_type = other RNA
ttcaatgctatggtgactac

SEQ ID NO: 16992 - RNA, 20 nt, synthetic construct
  source 1..20: mol_type = other RNA
ttcaatgtcacaagcagctt

SEQ ID NO: 16993 - RNA, 20 nt, synthetic construct
  source 1..20: mol_type = other RNA
ttcaattctagtttggtcct

SEQ ID NO: 16994 - RNA, 20 nt, synthetic construct
  source 1..20: mol_type = other RNA
ttcaatttcaagcaacgtgg

SEQ ID NO: 16995 - RNA, 20 nt, synthetic construct
  source 1..20: mol_type = other RNA
ttcacctaccaaccttacct

SEQ ID NO: 16996 - RNA, 20 nt, synthetic construct
  source 1..20: mol_type = other RNA
ttcactcccttttctccact

SEQ ID NO: 16997 - RNA, 20 nt, synthetic construct
  source 1..20: mol_type = other RNA
ttcagaaaaacttatgatgg

SEQ ID NO: 16998 - RNA, 20 nt, synthetic construct
  source 1..20: mol_type = other RNA
ttcagagagaaagtgttttt

SEQ ID NO: 16999 - RNA, 20 nt, synthetic construct
  source 1..20: mol_type = other RNA
ttcattacttttttcccctc

SEQ ID NO: 17000 - RNA, 20 nt, synthetic construct
  source 1..20: mol_type = other RNA
ttcatttagcattgatctaa

SEQ ID NO: 17001 - RNA, 20 nt, synthetic construct
  source 1..20: mol_type = other RNA
ttccaaaaaacactttctct

SEQ ID NO: 17002 - RNA, 20 nt, synthetic construct
  source 1..20: mol_type = other RNA
ttccaaaagaactaaagtac

SEQ ID NO: 17003 - RNA, 20 nt, synthetic construct
  source 1..20: mol_type = other RNA
ttccacattgagttagatca

SEQ ID NO: 17004 - RNA, 20 nt, synthetic construct
  source 1..20: mol_type = other RNA
ttccacgttgcttgaaattg

SEQ ID NO: 17005 - RNA, 20 nt, synthetic construct
  source 1..20: mol_type = other RNA
ttccagaagaaaacagttcc

SEQ ID NO: 17006 - RNA, 20 nt, synthetic construct
  source 1..20: mol_type = other RNA
ttccagaccagcatgggcaa

SEQ ID NO: 17007 - RNA, 20 nt, synthetic construct
  source 1..20: mol_type = other RNA
ttcccctcaactttaataat

SEQ ID NO: 17008 - RNA, 20 nt, synthetic construct
  source 1..20: mol_type = other RNA
ttcctctggtactctgtata

SEQ ID NO: 17009 - RNA, 20 nt, synthetic construct
  source 1..20: mol_type = other RNA
ttccttcaacgagcacatgg

SEQ ID NO: 17010 - RNA, 20 nt, synthetic construct
  source 1..20: mol_type = other RNA
ttcgtgcaagttaacacggc

SEQ ID NO: 17011 - RNA, 20 nt, synthetic construct
  source 1..20: mol_type = other RNA
ttctaggctctttaccatgt

SEQ ID NO: 17012 - RNA, 20 nt, synthetic construct
  source 1..20: mol_type = other RNA
ttctagtttggtcctagatg

SEQ ID NO: 17013 - RNA, 20 nt, synthetic construct
  source 1..20: mol_type = other RNA
ttctcaaactgtactttagt

SEQ ID NO: 17014 - RNA, 20 nt, synthetic construct
  source 1..20: mol_type = other RNA
ttctccactccctcaggtgg

SEQ ID NO: 17015 - RNA, 20 nt, synthetic construct
  source 1..20: mol_type = other RNA
ttctccactgtgttctgtgt

SEQ ID NO: 17016 - RNA, 20 nt, synthetic construct
  source 1..20: mol_type = other RNA
ttctctctgaagcctttctc

SEQ ID NO: 17017 - RNA, 20 nt, synthetic construct
  source 1..20: mol_type = other RNA
ttctgaagtttgttagctta

SEQ ID NO: 17018 - RNA, 20 nt, synthetic construct
  source 1..20: mol_type = other RNA
ttctggaagcagacctagac

SEQ ID NO: 17019 - RNA, 20 nt, synthetic construct
  source 1..20: mol_type = other RNA
ttctgggcaaatattggtat

SEQ ID NO: 17020 - RNA, 20 nt, synthetic construct
  source 1..20: mol_type = other RNA
ttctgtgtctctgtgttcta

SEQ ID NO: 17021 - RNA, 20 nt, synthetic construct
  source 1..20: mol_type = other RNA
ttcttaactctatatatacc

SEQ ID NO: 17022 - RNA, 20 nt, synthetic construct
  source 1..20: mol_type = other RNA
ttcttccacattgagttaga

SEQ ID NO: 17023 - RNA, 20 nt, synthetic construct
  source 1..20: mol_type = other RNA
ttcttctggaagcagaccta

SEQ ID NO: 17024 - RNA, 20 nt, synthetic construct
  source 1..20: mol_type = other RNA
ttctttgatttcatttagca

SEQ ID NO: 17025 - RNA, 20 nt, synthetic construct
  source 1..20: mol_type = other RNA
ttcttttggaaacagtgatc

SEQ ID NO: 17026 - RNA, 20 nt, synthetic construct
  source 1..20: mol_type = other RNA
ttgaaggaacaatggatatg

SEQ ID NO: 17027 - RNA, 20 nt, synthetic construct
  source 1..20: mol_type = other RNA
ttgaaggtatttaagattca

SEQ ID NO: 17028 - RNA, 20 nt, synthetic construct
  source 1..20: mol_type = other RNA
ttgaatcttaaataccttca

SEQ ID NO: 17029 - RNA, 20 nt, synthetic construct
  source 1..20: mol_type = other RNA
ttgaatgtgtagtttataat

SEQ ID NO: 17030 - RNA, 20 nt, synthetic construct
  source 1..20: mol_type = other RNA
ttgacttgtaaatctcttaa

SEQ ID NO: 17031 - RNA, 20 nt, synthetic construct
  source 1..20: mol_type = other RNA
ttgagaaatgcatacttaat

SEQ ID NO: 17032 - RNA, 20 nt, synthetic construct
  source 1..20: mol_type = other RNA
ttgagagccgtaacaccacc

SEQ ID NO: 17033 - RNA, 20 nt, synthetic construct
  source 1..20: mol_type = other RNA
ttgagcccagtatttccaga

SEQ ID NO: 17034 - RNA, 20 nt, synthetic construct
  source 1..20: mol_type = other RNA
ttgaggggaaaaaagtaatg

SEQ ID NO: 17035 - RNA, 20 nt, synthetic construct
  source 1..20: mol_type = other RNA
ttgagttagatcaatgctaa

SEQ ID NO: 17036 - RNA, 20 nt, synthetic construct
  source 1..20: mol_type = other RNA
ttgatctaactcaatgtgga

SEQ ID NO: 17037 - RNA, 20 nt, synthetic construct
  source 1..20: mol_type = other RNA
ttgatttatacagagtacca

SEQ ID NO: 17038 - RNA, 20 nt, synthetic construct
  source 1..20: mol_type = other RNA
ttgatttcatttagcattga

SEQ ID NO: 17039 - RNA, 20 nt, synthetic construct
  source 1..20: mol_type = other RNA
ttgattttcaatttcaagca

SEQ ID NO: 17040 - RNA, 20 nt, synthetic construct
  source 1..20: mol_type = other RNA
ttgcacgaatgtaaccttct

SEQ ID NO: 17041 - RNA, 20 nt, synthetic construct
  source 1..20: mol_type = other RNA
ttgcatcaccttatatgtct

SEQ ID NO: 17042 - RNA, 20 nt, synthetic construct
  source 1..20: mol_type = other RNA
ttgcccagaaaaggtaaggt

SEQ ID NO: 17043 - RNA, 20 nt, synthetic construct
  source 1..20: mol_type = other RNA
ttgcccatcataagtttttc

SEQ ID NO: 17044 - RNA, 20 nt, synthetic construct
  source 1..20: mol_type = other RNA
ttgcccatgctggtctggaa

SEQ ID NO: 17045 - RNA, 20 nt, synthetic construct
  source 1..20: mol_type = other RNA
ttgctcatttctttgatttc

SEQ ID NO: 17046 - RNA, 20 nt, synthetic construct
  source 1..20: mol_type = other RNA
ttgctgtattataaactaca

SEQ ID NO: 17047 - RNA, 20 nt, synthetic construct
  source 1..20: mol_type = other RNA
ttgcttgaaattgaaaatca

SEQ ID NO: 17048 - RNA, 20 nt, synthetic construct
  source 1..20: mol_type = other RNA
ttgcttgagcccagtatttc

SEQ ID NO: 17049 - RNA, 20 nt, synthetic construct
  source 1..20: mol_type = other RNA
ttggaaacagtgatccattc

SEQ ID NO: 17050 - RNA, 20 nt, synthetic construct
  source 1..20: mol_type = other RNA
ttggaatggatcactgtttc

SEQ ID NO: 17051 - RNA, 20 nt, synthetic construct
  source 1..20: mol_type = other RNA
ttggtaggtgaacatagtta

SEQ ID NO: 17052 - RNA, 20 nt, synthetic construct
  source 1..20: mol_type = other RNA
ttggtatatatagagttaag

SEQ ID NO: 17053 - RNA, 20 nt, synthetic construct
  source 1..20: mol_type = other RNA
ttggtcctagatgaccacat

SEQ ID NO: 17054 - RNA, 20 nt, synthetic construct
  source 1..20: mol_type = other RNA
ttgtaaatctcttaaaatca

SEQ ID NO: 17055 - RNA, 20 nt, synthetic construct
  source 1..20: mol_type = other RNA
ttgtatattgtcacaaaatc

SEQ ID NO: 17056 - RNA, 20 nt, synthetic construct
  source 1..20: mol_type = other RNA
ttgtatttaactttgctgta

SEQ ID NO: 17057 - RNA, 20 nt, synthetic construct
  source 1..20: mol_type = other RNA
ttgtcacaaaatcccatata

SEQ ID NO: 17058 - RNA, 20 nt, synthetic construct
  source 1..20: mol_type = other RNA
ttgtcactataattgttaat

SEQ ID NO: 17059 - RNA, 20 nt, synthetic construct
  source 1..20: mol_type = other RNA
ttgtgacaatatacaaggat

SEQ ID NO: 17060 - RNA, 20 nt, synthetic construct
  source 1..20: mol_type = other RNA
ttgtgacattgaaggtattt

SEQ ID NO: 17061 - RNA, 20 nt, synthetic construct
  source 1..20: mol_type = other RNA
ttgttactaagctaacaaac

SEQ ID NO: 17062 - RNA, 20 nt, synthetic construct
  source 1..20: mol_type = other RNA
ttgttagcttagtaacaatt

SEQ ID NO: 17063 - RNA, 20 nt, synthetic construct
  source 1..20: mol_type = other RNA
ttgttccttcaacgagcaca

SEQ ID NO: 17064 - RNA, 20 nt, synthetic construct
  source 1..20: mol_type = other RNA
ttgttgggtaaatttattat

SEQ ID NO: 17065 - RNA, 20 nt, synthetic construct
  source 1..20: mol_type = other RNA
tttaaaaacaggtagtcacc

SEQ ID NO: 17066 - RNA, 20 nt, synthetic construct
  source 1..20: mol_type = other RNA
tttaaagatgatgtcttaat

SEQ ID NO: 17067 - RNA, 20 nt, synthetic construct
  source 1..20: mol_type = other RNA
tttaacaaaaagaggagatt

SEQ ID NO: 17068 - RNA, 20 nt, synthetic construct
  source 1..20: mol_type = other RNA
tttaactttgctgtattata

SEQ ID NO: 17069 - RNA, 20 nt, synthetic construct
  source 1..20: mol_type = other RNA
tttaagagatttacaagtca

SEQ ID NO: 17070 - RNA, 20 nt, synthetic construct
  source 1..20: mol_type = other RNA
tttaagattcaattctagtt

SEQ ID NO: 17071 - RNA, 20 nt, synthetic construct
  source 1..20: mol_type = other RNA
tttaatgacacttactatat

SEQ ID NO: 17072 - RNA, 20 nt, synthetic construct
  source 1..20: mol_type = other RNA
tttacaagtcaaaaataaac

SEQ ID NO: 17073 - RNA, 20 nt, synthetic construct
  source 1..20: mol_type = other RNA
tttaccatgtgctcgttgaa

SEQ ID NO: 17074 - RNA, 20 nt, synthetic construct
  source 1..20: mol_type = other RNA
tttacccaacaaaaaagttt

SEQ ID NO: 17075 - RNA, 20 nt, synthetic construct
  source 1..20: mol_type = other RNA
tttagcattgatctaactca

SEQ ID NO: 17076 - RNA, 20 nt, synthetic construct
  source 1..20: mol_type = other RNA
tttagttcttttggaaacag

SEQ ID NO: 17077 - RNA, 20 nt, synthetic construct
  source 1..20: mol_type = other RNA
tttataatacagcaaagtta

SEQ ID NO: 17078 - RNA, 20 nt, synthetic construct
  source 1..20: mol_type = other RNA
tttatacagagtaccagagg

SEQ ID NO: 17079 - RNA, 20 nt, synthetic construct
  source 1..20: mol_type = other RNA
tttattattaaagttgaggg

SEQ ID NO: 17080 - RNA, 20 nt, synthetic construct
  source 1..20: mol_type = other RNA
tttcaaattacctattaagt

SEQ ID NO: 17081 - RNA, 20 nt, synthetic construct
  source 1..20: mol_type = other RNA
tttcaagcaacgtggaactg

SEQ ID NO: 17082 - RNA, 20 nt, synthetic construct
  source 1..20: mol_type = other RNA
tttcaatttcaagcaacgtg

SEQ ID NO: 17083 - RNA, 20 nt, synthetic construct
  source 1..20: mol_type = other RNA
tttcactcccttttctccac

SEQ ID NO: 17084 - RNA, 20 nt, synthetic construct
  source 1..20: mol_type = other RNA
tttcatttagcattgatcta

SEQ ID NO: 17085 - RNA, 20 nt, synthetic construct
  source 1..20: mol_type = other RNA
tttccaaaagaactaaagta

SEQ ID NO: 17086 - RNA, 20 nt, synthetic construct
  source 1..20: mol_type = other RNA
tttccagaccagcatgggca

SEQ ID NO: 17087 - RNA, 20 nt, synthetic construct
  source 1..20: mol_type = other RNA
tttcccctcaactttaataa

SEQ ID NO: 17088 - RNA, 20 nt, synthetic construct
  source 1..20: mol_type = other RNA
tttctcaaactgtactttag

SEQ ID NO: 17089 - RNA, 20 nt, synthetic construct
  source 1..20: mol_type = other RNA
tttctccactccctcaggtg

SEQ ID NO: 17090 - RNA, 20 nt, synthetic construct
  source 1..20: mol_type = other RNA
tttctccactgtgttctgtg

SEQ ID NO: 17091 - RNA, 20 nt, synthetic construct
  source 1..20: mol_type = other RNA
tttctctctgaagcctttct

SEQ ID NO: 17092 - RNA, 20 nt, synthetic construct
  source 1..20: mol_type = other RNA
tttctgaagtttgttagctt

SEQ ID NO: 17093 - RNA, 20 nt, synthetic construct
  source 1..20: mol_type = other RNA
tttctgggcaaatattggta

SEQ ID NO: 17094 - RNA, 20 nt, synthetic construct
  source 1..20: mol_type = other RNA
tttcttctggaagcagacct

SEQ ID NO: 17095 - RNA, 20 nt, synthetic construct
  source 1..20: mol_type = other RNA
tttctttgatttcatttagc

SEQ ID NO: 17096 - RNA, 20 nt, synthetic construct
  source 1..20: mol_type = other RNA
tttgacttgtaaatctctta

SEQ ID NO: 17097 - RNA, 20 nt, synthetic construct
  source 1..20: mol_type = other RNA
tttgagaaatgcatacttaa

SEQ ID NO: 17098 - RNA, 20 nt, synthetic construct
  source 1..20: mol_type = other RNA
tttgatttcatttagcattg

SEQ ID NO: 17099 - RNA, 20 nt, synthetic construct
  source 1..20: mol_type = other RNA
tttgcatcaccttatatgtc

SEQ ID NO: 17100 - RNA, 20 nt, synthetic construct
  source 1..20: mol_type = other RNA
tttgcccagaaaaggtaagg

SEQ ID NO: 17101 - RNA, 20 nt, synthetic construct
  source 1..20: mol_type = other RNA
tttgctgtattataaactac

SEQ ID NO: 17102 - RNA, 20 nt, synthetic construct
  source 1..20: mol_type = other RNA
tttggaaacagtgatccatt

SEQ ID NO: 17103 - RNA, 20 nt, synthetic construct
  source 1..20: mol_type = other RNA
tttggaatggatcactgttt

SEQ ID NO: 17104 - RNA, 20 nt, synthetic construct
  source 1..20: mol_type = other RNA
tttggtcctagatgaccaca

SEQ ID NO: 17105 - RNA, 20 nt, synthetic construct
  source 1..20: mol_type = other RNA
tttgtcactataattgttaa

SEQ ID NO: 17106 - RNA, 20 nt, synthetic construct
  source 1..20: mol_type = other RNA
tttgtgacaatatacaagga

SEQ ID NO: 17107 - RNA, 20 nt, synthetic construct
  source 1..20: mol_type = other RNA
tttgttagcttagtaacaat

SEQ ID NO: 17108 - RNA, 20 nt, synthetic construct
  source 1..20: mol_type = other RNA
tttgttgggtaaatttatta

SEQ ID NO: 17109 - RNA, 20 nt, synthetic construct
  source 1..20: mol_type = other RNA
ttttaaaaacaggtagtcac

SEQ ID NO: 17110 - RNA, 20 nt, synthetic construct
  source 1..20: mol_type = other RNA
ttttaaagatgatgtcttaa

SEQ ID NO: 17111 - RNA, 20 nt, synthetic construct
  source 1..20: mol_type = other RNA
ttttaagagatttacaagtc

SEQ ID NO: 17112 - RNA, 20 nt, synthetic construct
  source 1..20: mol_type = other RNA
ttttcaatttcaagcaacgt

SEQ ID NO: 17113 - RNA, 20 nt, synthetic construct
  source 1..20: mol_type = other RNA
ttttcccctcaactttaata

SEQ ID NO: 17114 - RNA, 20 nt, synthetic construct
  source 1..20: mol_type = other RNA
ttttctccactgtgttctgt

SEQ ID NO: 17115 - RNA, 20 nt, synthetic construct
  source 1..20: mol_type = other RNA
ttttctgaagtttgttagct

SEQ ID NO: 17116 - RNA, 20 nt, synthetic construct
  source 1..20: mol_type = other RNA
ttttctgggcaaatattggt

SEQ ID NO: 17117 - RNA, 20 nt, synthetic construct
  source 1..20: mol_type = other RNA
ttttcttctggaagcagacc

SEQ ID NO: 17118 - RNA, 20 nt, synthetic construct
  source 1..20: mol_type = other RNA
ttttgacttgtaaatctctt

SEQ ID NO: 17119 - RNA, 20 nt, synthetic construct
  source 1..20: mol_type = other RNA
ttttgcatcaccttatatgt

SEQ ID NO: 17120 - RNA, 20 nt, synthetic construct
  source 1..20: mol_type = other RNA
ttttggaaacagtgatccat

SEQ ID NO: 17121 - RNA, 20 nt, synthetic construct
  source 1..20: mol_type = other RNA
ttttggaatggatcactgtt

SEQ ID NO: 17122 - RNA, 20 nt, synthetic construct
  source 1..20: mol_type = other RNA
ttttgtcactataattgtta

SEQ ID NO: 17123 - RNA, 20 nt, synthetic construct
  source 1..20: mol_type = other RNA
ttttgtgacaatatacaagg

SEQ ID NO: 17124 - RNA, 20 nt, synthetic construct
  source 1..20: mol_type = other RNA
ttttgttgggtaaatttatt

SEQ ID NO: 17125 - RNA, 20 nt, synthetic construct
  source 1..20: mol_type = other RNA
tttttaaagatgatgtctta

SEQ ID NO: 17126 - RNA, 20 nt, synthetic construct
  source 1..20: mol_type = other RNA
tttttcccctcaactttaat

SEQ ID NO: 17127 - RNA, 20 nt, synthetic construct
  source 1..20: mol_type = other RNA
tttttctgaagtttgttagc

SEQ ID NO: 17128 - RNA, 20 nt, synthetic construct
  source 1..20: mol_type = other RNA
tttttgacttgtaaatctct

SEQ ID NO: 17129 - RNA, 20 nt, synthetic construct
  source 1..20: mol_type = other RNA
tttttgcatcaccttatatg

SEQ ID NO: 17130 - RNA, 20 nt, synthetic construct
  source 1..20: mol_type = other RNA
tttttggaatggatcactgt

SEQ ID NO: 17131 - RNA, 20 nt, synthetic construct
  source 1..20: mol_type = other RNA
tttttgtcactataattgtt

SEQ ID NO: 17132 - RNA, 20 nt, synthetic construct
  source 1..20: mol_type = other RNA
tttttgttgggtaaatttat

SEQ ID NO: 17133 - RNA, 20 nt, synthetic construct
  source 1..20: mol_type = other RNA
ttttttaaagatgatgtctt

SEQ ID NO: 17134 - RNA, 20 nt, synthetic construct
  source 1..20: mol_type = other RNA
ttttttcccctcaactttaa

SEQ ID NO: 17135 - RNA, 20 nt, synthetic construct
  source 1..20: mol_type = other RNA
ttttttgcatcaccttatat

SEQ ID NO: 17136 - RNA, 20 nt, synthetic construct
  source 1..20: mol_type = other RNA
ttttttggaatggatcactg

SEQ ID NO: 17137 - RNA, 20 nt, synthetic construct
  source 1..20: mol_type = other RNA
ttttttgtcactataattgt

SEQ ID NO: 17138 - RNA, 20 nt, synthetic construct
  source 1..20: mol_type = other RNA
ttttttgttgggtaaattta

SEQ ID NO: 17139 - RNA, 21 nt, synthetic construct
  source 1..21: mol_type = other RNA
aaaaaacactttctctctgaa

SEQ ID NO: 17140 - RNA, 21 nt, synthetic construct
  source 1..21: mol_type = other RNA
aaaaaatgaggagcatataat

SEQ ID NO: 17141 - RNA, 21 nt, synthetic construct
  source 1..21: mol_type = other RNA
aaaaacactttctctctgaag

SEQ ID NO: 17142 - RNA, 21 nt, synthetic construct
  source 1..21: mol_type = other RNA
aaaaacaggtagtcaccatag

SEQ ID NO: 17143 - RNA, 21 nt, synthetic construct
  source 1..21: mol_type = other RNA
aaaaacttatgatgggcaagc

SEQ ID NO: 17144 - RNA, 21 nt, synthetic construct
  source 1..21: mol_type = other RNA
aaaaagaggagattaataaca

SEQ ID NO: 17145 - RNA, 21 nt, synthetic construct
  source 1..21: mol_type = other RNA
aaaaatgaggagcatataatt

SEQ ID NO: 17146 - RNA, 21 nt, synthetic construct
  source 1..21: mol_type = other RNA
aaaaatgttattaatctcctc

SEQ ID NO: 17147 - RNA, 21 nt, synthetic construct
  source 1..21: mol_type = other RNA
aaaacactttctctctgaagc

SEQ ID NO: 17148 - RNA, 21 nt, synthetic construct
  source 1..21: mol_type = other RNA
aaaacaggtagtcaccatagc

SEQ ID NO: 17149 - RNA, 21 nt, synthetic construct
  source 1..21: mol_type = other RNA
aaaacagttccacgttgcttg

SEQ ID NO: 17150 - RNA, 21 nt, synthetic construct
  source 1..21: mol_type = other RNA
aaaacttatgatgggcaagct

SEQ ID NO: 17151 - RNA, 21 nt, synthetic construct
  source 1..21: mol_type = other RNA
aaaagaactaaagtacagttt

SEQ ID NO: 17152 - RNA, 21 nt, synthetic construct
  source 1..21: mol_type = other RNA
aaaagaattgcttgagcccag

SEQ ID NO: 17153 - RNA, 21 nt, synthetic construct
  source 1..21: mol_type = other RNA
aaaagaggagattaataacat

SEQ ID NO: 17154 - RNA, 21 nt, synthetic construct
  source 1..21: mol_type = other RNA
aaaagggagtgaaatgtcttt

SEQ ID NO: 17155 - RNA, 21 nt, synthetic construct
  source 1..21: mol_type = other RNA
aaaaggtaaggttggtaggtg

SEQ ID NO: 17156 - RNA, 21 nt, synthetic construct
  source 1..21: mol_type = other RNA
aaaataaacttttttgttggg

SEQ ID NO: 17157 - RNA, 21 nt, synthetic construct
  source 1..21: mol_type = other RNA
aaaatcccatatatagtaagt

SEQ ID NO: 17158 - RNA, 21 nt, synthetic construct
  source 1..21: mol_type = other RNA
aaaatgaggagcatataatta

SEQ ID NO: 17159 - RNA, 21 nt, synthetic construct
  source 1..21: mol_type = other RNA
aaaatgttattaatctcctct

SEQ ID NO: 17160 - RNA, 21 nt, synthetic construct
  source 1..21: mol_type = other RNA
aaaattgttactaagctaaca

SEQ ID NO: 17161 - RNA, 21 nt, synthetic construct
  source 1..21: mol_type = other RNA
aaacactttctctctgaagcc

SEQ ID NO: 17162 - RNA, 21 nt, synthetic construct
  source 1..21: mol_type = other RNA
aaacaggtagtcaccatagca

SEQ ID NO: 17163 - RNA, 21 nt, synthetic construct
  source 1..21: mol_type = other RNA
aaacagtgatccattccaaaa

SEQ ID NO: 17164 - RNA, 21 nt, synthetic construct
  source 1..21: mol_type = other RNA
aaacagttccacgttgcttga

SEQ ID NO: 17165 - RNA, 21 nt, synthetic construct
  source 1..21: mol_type = other RNA
aaactacacattcaatgctat

SEQ ID NO: 17166 - RNA, 21 nt, synthetic construct
  source 1..21: mol_type = other RNA
aaactgtactttagttctttt

SEQ ID NO: 17167 - RNA, 21 nt, synthetic construct
  source 1..21: mol_type = other RNA
aaacttatgatgggcaagctg

SEQ ID NO: 17168 - RNA, 21 nt, synthetic construct
  source 1..21: mol_type = other RNA
aaacttcagaaaaacttatga

SEQ ID NO: 17169 - RNA, 21 nt, synthetic construct
  source 1..21: mol_type = other RNA
aaacttttttgttgggtaaat

SEQ ID NO: 17170 - RNA, 21 nt, synthetic construct
  source 1..21: mol_type = other RNA
aaagaaatgagcaactaactt

SEQ ID NO: 17171 - RNA, 21 nt, synthetic construct
  source 1..21: mol_type = other RNA
aaagaactaaagtacagtttg

SEQ ID NO: 17172 - RNA, 21 nt, synthetic construct
  source 1..21: mol_type = other RNA
aaagaattgcttgagcccagt

SEQ ID NO: 17173 - RNA, 21 nt, synthetic construct
  source 1..21: mol_type = other RNA
aaagacatttcactccctttt

SEQ ID NO: 17174 - RNA, 21 nt, synthetic construct
  source 1..21: mol_type = other RNA
aaagagcctagaacacagaga

SEQ ID NO: 17175 - RNA, 21 nt, synthetic construct
  source 1..21: mol_type = other RNA
aaagaggagattaataacatt

SEQ ID NO: 17176 - RNA, 21 nt, synthetic construct
  source 1..21: mol_type = other RNA
aaagatgatgtcttaatgtat

SEQ ID NO: 17177 - RNA, 21 nt, synthetic construct
  source 1..21: mol_type = other RNA
aaaggcttcagagagaaagtg

SEQ ID NO: 17178 - RNA, 21 nt, synthetic construct
  source 1..21: mol_type = other RNA
aaagggagtgaaatgtcttta

SEQ ID NO: 17179 - RNA, 21 nt, synthetic construct
  source 1..21: mol_type = other RNA
aaaggtaaggttggtaggtga

SEQ ID NO: 17180 - RNA, 21 nt, synthetic construct
  source 1..21: mol_type = other RNA
aaagtaatgaattaagtatgc

SEQ ID NO: 17181 - RNA, 21 nt, synthetic construct
  source 1..21: mol_type = other RNA
aaagtacagtttgagaaatgc

SEQ ID NO: 17182 - RNA, 21 nt, synthetic construct
  source 1..21: mol_type = other RNA
aaagtgttttttggaatggat

SEQ ID NO: 17183 - RNA, 21 nt, synthetic construct
  source 1..21: mol_type = other RNA
aaagttgaggggaaaaaagta

SEQ ID NO: 17184 - RNA, 21 nt, synthetic construct
  source 1..21: mol_type = other RNA
aaataaacttttttgttgggt

SEQ ID NO: 17185 - RNA, 21 nt, synthetic construct
  source 1..21: mol_type = other RNA
aaataccttcaatgtcacaag

SEQ ID NO: 17186 - RNA, 21 nt, synthetic construct
  source 1..21: mol_type = other RNA
aaatactgggctcaagcaatt

SEQ ID NO: 17187 - RNA, 21 nt, synthetic construct
  source 1..21: mol_type = other RNA
aaatcaaagaaatgagcaact

SEQ ID NO: 17188 - RNA, 21 nt, synthetic construct
  source 1..21: mol_type = other RNA
aaatcccatatatagtaagtg

SEQ ID NO: 17189 - RNA, 21 nt, synthetic construct
  source 1..21: mol_type = other RNA
aaatgaaatcaaagaaatgag

SEQ ID NO: 17190 - RNA, 21 nt, synthetic construct
  source 1..21: mol_type = other RNA
aaatgagcaactaacttaata

SEQ ID NO: 17191 - RNA, 21 nt, synthetic construct
  source 1..21: mol_type = other RNA
aaatgaggagcatataattat

SEQ ID NO: 17192 - RNA, 21 nt, synthetic construct
  source 1..21: mol_type = other RNA
aaatgtctttaatgacactta

SEQ ID NO: 17193 - RNA, 21 nt, synthetic construct
  source 1..21: mol_type = other RNA
aaatgttattaatctcctctt

SEQ ID NO: 17194 - RNA, 21 nt, synthetic construct
  source 1..21: mol_type = other RNA
aaattagcttttaaaaacagg

SEQ ID NO: 17195 - RNA, 21 nt, synthetic construct
  source 1..21: mol_type = other RNA
aaattgtatttaactttgctg

SEQ ID NO: 17196 - RNA, 21 nt, synthetic construct
  source 1..21: mol_type = other RNA
aaattgttactaagctaacaa

SEQ ID NO: 17197 - RNA, 21 nt, synthetic construct
  source 1..21: mol_type = other RNA
aaatttacccaacaaaaaagt

SEQ ID NO: 17198 - RNA, 21 nt, synthetic construct
  source 1..21: mol_type = other RNA
aacaaaaagaggagattaata

SEQ ID NO: 17199 - RNA, 21 nt, synthetic construct
  source 1..21: mol_type = other RNA
aacaaacttcagaaaaactta

SEQ ID NO: 17200 - RNA, 21 nt, synthetic construct
  source 1..21: mol_type = other RNA
aacaatggatatgtggtcatc

SEQ ID NO: 17201 - RNA, 21 nt, synthetic construct
  source 1..21: mol_type = other RNA
aacacagagacacagaacaca

SEQ ID NO: 17202 - RNA, 21 nt, synthetic construct
  source 1..21: mol_type = other RNA
aacacagcattgagagccgta

SEQ ID NO: 17203 - RNA, 21 nt, synthetic construct
  source 1..21: mol_type = other RNA
aacacagtggagaaaagggag

SEQ ID NO: 17204 - RNA, 21 nt, synthetic construct
  source 1..21: mol_type = other RNA
aacaccacctgagggagtgga

SEQ ID NO: 17205 - RNA, 21 nt, synthetic construct
  source 1..21: mol_type = other RNA
aacacggcttaatgattaact

SEQ ID NO: 17206 - RNA, 21 nt, synthetic construct
  source 1..21: mol_type = other RNA
aacactttctctctgaagcct

SEQ ID NO: 17207 - RNA, 21 nt, synthetic construct
  source 1..21: mol_type = other RNA
aacaggtagtcaccatagcat

SEQ ID NO: 17208 - RNA, 21 nt, synthetic construct
  source 1..21: mol_type = other RNA
aacagtgatccattccaaaaa

SEQ ID NO: 17209 - RNA, 21 nt, synthetic construct
  source 1..21: mol_type = other RNA
aacagttccacgttgcttgaa

SEQ ID NO: 17210 - RNA, 21 nt, synthetic construct
  source 1..21: mol_type = other RNA
aacatagttaatcattaagcc

SEQ ID NO: 17211 - RNA, 21 nt, synthetic construct
  source 1..21: mol_type = other RNA
aaccatccttgtatattgtca

SEQ ID NO: 17212 - RNA, 21 nt, synthetic construct
  source 1..21: mol_type = other RNA
aaccttaccttttctgggcaa

SEQ ID NO: 17213 - RNA, 21 nt, synthetic construct
  source 1..21: mol_type = other RNA
aaccttcttccacattgagtt

SEQ ID NO: 17214 - RNA, 21 nt, synthetic construct
  source 1..21: mol_type = other RNA
aacgagcacatggtaaagagc

SEQ ID NO: 17215 - RNA, 21 nt, synthetic construct
  source 1..21: mol_type = other RNA
aacgtggaactgttttcttct

SEQ ID NO: 17216 - RNA, 21 nt, synthetic construct
  source 1..21: mol_type = other RNA
aactaaagtacagtttgagaa

SEQ ID NO: 17217 - RNA, 21 nt, synthetic construct
  source 1..21: mol_type = other RNA
aactacacattcaatgctatg

SEQ ID NO: 17218 - RNA, 21 nt, synthetic construct
  source 1..21: mol_type = other RNA
aactatgttcacctaccaacc

SEQ ID NO: 17219 - RNA, 21 nt, synthetic construct
  source 1..21: mol_type = other RNA
aactcaatgtggaagaaggtt

SEQ ID NO: 17220 - RNA, 21 nt, synthetic construct
  source 1..21: mol_type = other RNA
aactgtactttagttcttttg

SEQ ID NO: 17221 - RNA, 21 nt, synthetic construct
  source 1..21: mol_type = other RNA
aactgttttcttctggaagca

SEQ ID NO: 17222 - RNA, 21 nt, synthetic construct
  source 1..21: mol_type = other RNA
aacttatgatgggcaagctgc

SEQ ID NO: 17223 - RNA, 21 nt, synthetic construct
  source 1..21: mol_type = other RNA
aacttcagaaaaacttatgat

SEQ ID NO: 17224 - RNA, 21 nt, synthetic construct
  source 1..21: mol_type = other RNA
aacttgcacgaatgtaacctt

SEQ ID NO: 17225 - RNA, 21 nt, synthetic construct
  source 1..21: mol_type = other RNA
aactttgctgtattataaact

SEQ ID NO: 17226 - RNA, 21 nt, synthetic construct
  source 1..21: mol_type = other RNA
aacttttttgttgggtaaatt

SEQ ID NO: 17227 - RNA, 21 nt, synthetic construct
  source 1..21: mol_type = other RNA
aagaaaacagttccacgttgc

SEQ ID NO: 17228 - RNA, 21 nt, synthetic construct
  source 1..21: mol_type = other RNA
aagaaatgagcaactaactta

SEQ ID NO: 17229 - RNA, 21 nt, synthetic construct
  source 1..21: mol_type = other RNA
aagaactaaagtacagtttga

SEQ ID NO: 17230 - RNA, 21 nt, synthetic construct
  source 1..21: mol_type = other RNA
aagaaggttacattcgtgcaa

SEQ ID NO: 17231 - RNA, 21 nt, synthetic construct
  source 1..21: mol_type = other RNA
aagaagtctaggtctgcttcc

SEQ ID NO: 17232 - RNA, 21 nt, synthetic construct
  source 1..21: mol_type = other RNA
aagaattgcttgagcccagta

SEQ ID NO: 17233 - RNA, 21 nt, synthetic construct
  source 1..21: mol_type = other RNA
aagacatataaggtgatgcaa

SEQ ID NO: 17234 - RNA, 21 nt, synthetic construct
  source 1..21: mol_type = other RNA
aagacatttcactcccttttc

SEQ ID NO: 17235 - RNA, 21 nt, synthetic construct
  source 1..21: mol_type = other RNA
aagagatttacaagtcaaaaa

SEQ ID NO: 17236 - RNA, 21 nt, synthetic construct
  source 1..21: mol_type = other RNA
aagagcctagaacacagagac

SEQ ID NO: 17237 - RNA, 21 nt, synthetic construct
  source 1..21: mol_type = other RNA
aagaggagattaataacattt

SEQ ID NO: 17238 - RNA, 21 nt, synthetic construct
  source 1..21: mol_type = other RNA
aagatgatgtcttaatgtatt

SEQ ID NO: 17239 - RNA, 21 nt, synthetic construct
  source 1..21: mol_type = other RNA
aagattcaattctagtttggt

SEQ ID NO: 17240 - RNA, 21 nt, synthetic construct
  source 1..21: mol_type = other RNA
aagcaacgtggaactgttttc

SEQ ID NO: 17241 - RNA, 21 nt, synthetic construct
  source 1..21: mol_type = other RNA
aagcagacctagacttcttaa

SEQ ID NO: 17242 - RNA, 21 nt, synthetic construct
  source 1..21: mol_type = other RNA
aagcagcttgcccatcataag

SEQ ID NO: 17243 - RNA, 21 nt, synthetic construct
  source 1..21: mol_type = other RNA
aagccgtgttaacttgcacga

SEQ ID NO: 17244 - RNA, 21 nt, synthetic construct
  source 1..21: mol_type = other RNA
aagcctttctccactccctca

SEQ ID NO: 17245 - RNA, 21 nt, synthetic construct
  source 1..21: mol_type = other RNA
aagctaacaaacttcagaaaa

SEQ ID NO: 17246 - RNA, 21 nt, synthetic construct
  source 1..21: mol_type = other RNA
aagctgcttgtgacattgaag

SEQ ID NO: 17247 - RNA, 21 nt, synthetic construct
  source 1..21: mol_type = other RNA
aaggaacaatggatatgtggt

SEQ ID NO: 17248 - RNA, 21 nt, synthetic construct
  source 1..21: mol_type = other RNA
aaggatggttaagacatataa

SEQ ID NO: 17249 - RNA, 21 nt, synthetic construct
  source 1..21: mol_type = other RNA
aaggcttcagagagaaagtgt

SEQ ID NO: 17250 - RNA, 21 nt, synthetic construct
  source 1..21: mol_type = other RNA
aagggagtgaaatgtctttaa

SEQ ID NO: 17251 - RNA, 21 nt, synthetic construct
  source 1..21: mol_type = other RNA
aaggtaaaagaattgcttgag

SEQ ID NO: 17252 - RNA, 21 nt, synthetic construct
  source 1..21: mol_type = other RNA
aaggtaaggttggtaggtgaa

SEQ ID NO: 17253 - RNA, 21 nt, synthetic construct
  source 1..21: mol_type = other RNA
aaggtatttaagattcaattc

SEQ ID NO: 17254 - RNA, 21 nt, synthetic construct
  source 1..21: mol_type = other RNA
aaggttacattcgtgcaagtt

SEQ ID NO: 17255 - RNA, 21 nt, synthetic construct
  source 1..21: mol_type = other RNA
aaggttggtaggtgaacatag

SEQ ID NO: 17256 - RNA, 21 nt, synthetic construct
  source 1..21: mol_type = other RNA
aagtaatgaattaagtatgca

SEQ ID NO: 17257 - RNA, 21 nt, synthetic construct
  source 1..21: mol_type = other RNA
aagtacagtttgagaaatgca

SEQ ID NO: 17258 - RNA, 21 nt, synthetic construct
  source 1..21: mol_type = other RNA
aagtatgcatttctcaaactg

SEQ ID NO: 17259 - RNA, 21 nt, synthetic construct
  source 1..21: mol_type = other RNA
aagtctaggtctgcttccaga

SEQ ID NO: 17260 - RNA, 21 nt, synthetic construct
  source 1..21: mol_type = other RNA
aagtgtcattaaagacatttc

SEQ ID NO: 17261 - RNA, 21 nt, synthetic construct
  source 1..21: mol_type = other RNA
aagtgttttttggaatggatc

SEQ ID NO: 17262 - RNA, 21 nt, synthetic construct
  source 1..21: mol_type = other RNA
aagttaacacggcttaatgat

SEQ ID NO: 17263 - RNA, 21 nt, synthetic construct
  source 1..21: mol_type = other RNA
aagttagttgctcatttcttt

SEQ ID NO: 17264 - RNA, 21 nt, synthetic construct
  source 1..21: mol_type = other RNA
aagttgaggggaaaaaagtaa

SEQ ID NO: 17265 - RNA, 21 nt, synthetic construct
  source 1..21: mol_type = other RNA
aagtttgttagcttagtaaca

SEQ ID NO: 17266 - RNA, 21 nt, synthetic construct
  source 1..21: mol_type = other RNA
aagtttttctgaagtttgtta

SEQ ID NO: 17267 - RNA, 21 nt, synthetic construct
  source 1..21: mol_type = other RNA
aataaacttttttgttgggta

SEQ ID NO: 17268 - RNA, 21 nt, synthetic construct
  source 1..21: mol_type = other RNA
aatacagcaaagttaaataca

SEQ ID NO: 17269 - RNA, 21 nt, synthetic construct
  source 1..21: mol_type = other RNA
aatacattaagacatcatctt

SEQ ID NO: 17270 - RNA, 21 nt, synthetic construct
  source 1..21: mol_type = other RNA
aataccttcaatgtcacaagc

SEQ ID NO: 17271 - RNA, 21 nt, synthetic construct
  source 1..21: mol_type = other RNA
aatactgggctcaagcaattc

SEQ ID NO: 17272 - RNA, 21 nt, synthetic construct
  source 1..21: mol_type = other RNA
aatatacaaggatggttaaga

SEQ ID NO: 17273 - RNA, 21 nt, synthetic construct
  source 1..21: mol_type = other RNA
aatatttgcccagaaaaggta

SEQ ID NO: 17274 - RNA, 21 nt, synthetic construct
  source 1..21: mol_type = other RNA
aatcaaagaaatgagcaacta

SEQ ID NO: 17275 - RNA, 21 nt, synthetic construct
  source 1..21: mol_type = other RNA
aatcattaagccgtgttaact

SEQ ID NO: 17276 - RNA, 21 nt, synthetic construct
  source 1..21: mol_type = other RNA
aatcccatatatagtaagtgt

SEQ ID NO: 17277 - RNA, 21 nt, synthetic construct
  source 1..21: mol_type = other RNA
aatctcctctttttgttaaat

SEQ ID NO: 17278 - RNA, 21 nt, synthetic construct
  source 1..21: mol_type = other RNA
aatcttaaataccttcaatgt

SEQ ID NO: 17279 - RNA, 21 nt, synthetic construct
  source 1..21: mol_type = other RNA
aatgaaatcaaagaaatgagc

SEQ ID NO: 17280 - RNA, 21 nt, synthetic construct
  source 1..21: mol_type = other RNA
aatgaattaagtatgcatttc

SEQ ID NO: 17281 - RNA, 21 nt, synthetic construct
  source 1..21: mol_type = other RNA
aatgacacttactatatatgg

SEQ ID NO: 17282 - RNA, 21 nt, synthetic construct
  source 1..21: mol_type = other RNA
aatgagcaactaacttaatag

SEQ ID NO: 17283 - RNA, 21 nt, synthetic construct
  source 1..21: mol_type = other RNA
aatgaggagcatataattata

SEQ ID NO: 17284 - RNA, 21 nt, synthetic construct
  source 1..21: mol_type = other RNA
aatgattaactatgttcacct

SEQ ID NO: 17285 - RNA, 21 nt, synthetic construct
  source 1..21: mol_type = other RNA
aatgcatacttaattcattac

SEQ ID NO: 17286 - RNA, 21 nt, synthetic construct
  source 1..21: mol_type = other RNA
aatgctaaatgaaatcaaaga

SEQ ID NO: 17287 - RNA, 21 nt, synthetic construct
  source 1..21: mol_type = other RNA
aatgctatggtgactacctgt

SEQ ID NO: 17288 - RNA, 21 nt, synthetic construct
  source 1..21: mol_type = other RNA
aatgctgtgttcctctggtac

SEQ ID NO: 17289 - RNA, 21 nt, synthetic construct
  source 1..21: mol_type = other RNA
aatggatatgtggtcatctag

SEQ ID NO: 17290 - RNA, 21 nt, synthetic construct
  source 1..21: mol_type = other RNA
aatggatcactgtttccaaaa

SEQ ID NO: 17291 - RNA, 21 nt, synthetic construct
  source 1..21: mol_type = other RNA
aatgtaaccttcttccacatt

SEQ ID NO: 17292 - RNA, 21 nt, synthetic construct
  source 1..21: mol_type = other RNA
aatgtataattatatgctcct

SEQ ID NO: 17293 - RNA, 21 nt, synthetic construct
  source 1..21: mol_type = other RNA
aatgtattgcccatgctggtc

SEQ ID NO: 17294 - RNA, 21 nt, synthetic construct
  source 1..21: mol_type = other RNA
aatgtcacaagcagcttgccc

SEQ ID NO: 17295 - RNA, 21 nt, synthetic construct
  source 1..21: mol_type = other RNA
aatgtctttaatgacacttac

SEQ ID NO: 17296 - RNA, 21 nt, synthetic construct
  source 1..21: mol_type = other RNA
aatgtggaagaaggttacatt

SEQ ID NO: 17297 - RNA, 21 nt, synthetic construct
  source 1..21: mol_type = other RNA
aatgtgtagtttataatacag

SEQ ID NO: 17298 - RNA, 21 nt, synthetic construct
  source 1..21: mol_type = other RNA
aatgttattaatctcctcttt

SEQ ID NO: 17299 - RNA, 21 nt, synthetic construct
  source 1..21: mol_type = other RNA
aattaagtatgcatttctcaa

SEQ ID NO: 17300 - RNA, 21 nt, synthetic construct
  source 1..21: mol_type = other RNA
aattacctattaagttagttg

SEQ ID NO: 17301 - RNA, 21 nt, synthetic construct
  source 1..21: mol_type = other RNA
aattagcttttaaaaacaggt

SEQ ID NO: 17302 - RNA, 21 nt, synthetic construct
  source 1..21: mol_type = other RNA
aattatatgctcctcattttt

SEQ ID NO: 17303 - RNA, 21 nt, synthetic construct
  source 1..21: mol_type = other RNA
aattcattacttttttcccct

SEQ ID NO: 17304 - RNA, 21 nt, synthetic construct
  source 1..21: mol_type = other RNA
aattctagtttggtcctagat

SEQ ID NO: 17305 - RNA, 21 nt, synthetic construct
  source 1..21: mol_type = other RNA
aattgaatcttaaataccttc

SEQ ID NO: 17306 - RNA, 21 nt, synthetic construct
  source 1..21: mol_type = other RNA
aattgcttgagcccagtattt

SEQ ID NO: 17307 - RNA, 21 nt, synthetic construct
  source 1..21: mol_type = other RNA
aattgtatttaactttgctgt

SEQ ID NO: 17308 - RNA, 21 nt, synthetic construct
  source 1..21: mol_type = other RNA
aattgttactaagctaacaaa

SEQ ID NO: 17309 - RNA, 21 nt, synthetic construct
  source 1..21: mol_type = other RNA
aatttacccaacaaaaaagtt

SEQ ID NO: 17310 - RNA, 21 nt, synthetic construct
  source 1..21: mol_type = other RNA
aatttcaagcaacgtggaact

SEQ ID NO: 17311 - RNA, 21 nt, synthetic construct
  source 1..21: mol_type = other RNA
acaaaaaatgaggagcatata

SEQ ID NO: 17312 - RNA, 21 nt, synthetic construct
  source 1..21: mol_type = other RNA
acaaaaagaggagattaataa

SEQ ID NO: 17313 - RNA, 21 nt, synthetic construct
  source 1..21: mol_type = other RNA
acaaaatcccatatatagtaa

SEQ ID NO: 17314 - RNA, 21 nt, synthetic construct
  source 1..21: mol_type = other RNA
acaaacttcagaaaaacttat

SEQ ID NO: 17315 - RNA, 21 nt, synthetic construct
  source 1..21: mol_type = other RNA
acaagcagcttgcccatcata

SEQ ID NO: 17316 - RNA, 21 nt, synthetic construct
  source 1..21: mol_type = other RNA
acaaggatggttaagacatat

SEQ ID NO: 17317 - RNA, 21 nt, synthetic construct
  source 1..21: mol_type = other RNA
acaatatacaaggatggttaa

SEQ ID NO: 17318 - RNA, 21 nt, synthetic construct
  source 1..21: mol_type = other RNA
acaatggatatgtggtcatct

SEQ ID NO: 17319 - RNA, 21 nt, synthetic construct
  source 1..21: mol_type = other RNA
acacagaacacagtggagaaa

SEQ ID NO: 17320 - RNA, 21 nt, synthetic construct
  source 1..21: mol_type = other RNA
acacagagacacagaacacag

SEQ ID NO: 17321 - RNA, 21 nt, synthetic construct
  source 1..21: mol_type = other RNA
acacagcattgagagccgtaa

SEQ ID NO: 17322 - RNA, 21 nt, synthetic construct
  source 1..21: mol_type = other RNA
acacagtggagaaaagggagt

SEQ ID NO: 17323 - RNA, 21 nt, synthetic construct
  source 1..21: mol_type = other RNA
acacattcaatgctatggtga

SEQ ID NO: 17324 - RNA, 21 nt, synthetic construct
  source 1..21: mol_type = other RNA
acaccacctgagggagtggag

SEQ ID NO: 17325 - RNA, 21 nt, synthetic construct
  source 1..21: mol_type = other RNA
acacggcttaatgattaacta

SEQ ID NO: 17326 - RNA, 21 nt, synthetic construct
  source 1..21: mol_type = other RNA
acacttactatatatgggatt

SEQ ID NO: 17327 - RNA, 21 nt, synthetic construct
  source 1..21: mol_type = other RNA
acactttctctctgaagcctt

SEQ ID NO: 17328 - RNA, 21 nt, synthetic construct
  source 1..21: mol_type = other RNA
acagaacacagtggagaaaag

SEQ ID NO: 17329 - RNA, 21 nt, synthetic construct
  source 1..21: mol_type = other RNA
acagagacacagaacacagtg

SEQ ID NO: 17330 - RNA, 21 nt, synthetic construct
  source 1..21: mol_type = other RNA
acagagtaccagaggaacaca

SEQ ID NO: 17331 - RNA, 21 nt, synthetic construct
  source 1..21: mol_type = other RNA
acagcaaagttaaatacaatt

SEQ ID NO: 17332 - RNA, 21 nt, synthetic construct
  source 1..21: mol_type = other RNA
acagcattgagagccgtaaca

SEQ ID NO: 17333 - RNA, 21 nt, synthetic construct
  source 1..21: mol_type = other RNA
acaggtagtcaccatagcatt

SEQ ID NO: 17334 - RNA, 21 nt, synthetic construct
  source 1..21: mol_type = other RNA
acagtgatccattccaaaaaa

SEQ ID NO: 17335 - RNA, 21 nt, synthetic construct
  source 1..21: mol_type = other RNA
acagtggagaaaagggagtga

SEQ ID NO: 17336 - RNA, 21 nt, synthetic construct
  source 1..21: mol_type = other RNA
acagttccacgttgcttgaaa

SEQ ID NO: 17337 - RNA, 21 nt, synthetic construct
  source 1..21: mol_type = other RNA
acagtttgagaaatgcatact

SEQ ID NO: 17338 - RNA, 21 nt, synthetic construct
  source 1..21: mol_type = other RNA
acatagttaatcattaagccg

SEQ ID NO: 17339 - RNA, 21 nt, synthetic construct
  source 1..21: mol_type = other RNA
acatataaggtgatgcaaaaa

SEQ ID NO: 17340 - RNA, 21 nt, synthetic construct
  source 1..21: mol_type = other RNA
acatatccattgttccttcaa

SEQ ID NO: 17341 - RNA, 21 nt, synthetic construct
  source 1..21: mol_type = other RNA
acatggtaaagagcctagaac

SEQ ID NO: 17342 - RNA, 21 nt, synthetic construct
  source 1..21: mol_type = other RNA
acattaagacatcatctttaa

SEQ ID NO: 17343 - RNA, 21 nt, synthetic construct
  source 1..21: mol_type = other RNA
acattcaatgctatggtgact

SEQ ID NO: 17344 - RNA, 21 nt, synthetic construct
  source 1..21: mol_type = other RNA
acattcgtgcaagttaacacg

SEQ ID NO: 17345 - RNA, 21 nt, synthetic construct
  source 1..21: mol_type = other RNA
acattgaaggtatttaagatt

SEQ ID NO: 17346 - RNA, 21 nt, synthetic construct
  source 1..21: mol_type = other RNA
acattgagttagatcaatgct

SEQ ID NO: 17347 - RNA, 21 nt, synthetic construct
  source 1..21: mol_type = other RNA
acattgatttatacagagtac

SEQ ID NO: 17348 - RNA, 21 nt, synthetic construct
  source 1..21: mol_type = other RNA
acatttaacaaaaagaggaga

SEQ ID NO: 17349 - RNA, 21 nt, synthetic construct
  source 1..21: mol_type = other RNA
acatttcactcccttttctcc

SEQ ID NO: 17350 - RNA, 21 nt, synthetic construct
  source 1..21: mol_type = other RNA
accaaactagaattgaatctt

SEQ ID NO: 17351 - RNA, 21 nt, synthetic construct
  source 1..21: mol_type = other RNA
accaaccttaccttttctggg

SEQ ID NO: 17352 - RNA, 21 nt, synthetic construct
  source 1..21: mol_type = other RNA
accaatatttgcccagaaaag

SEQ ID NO: 17353 - RNA, 21 nt, synthetic construct
  source 1..21: mol_type = other RNA
accacatatccattgttcctt

SEQ ID NO: 17354 - RNA, 21 nt, synthetic construct
  source 1..21: mol_type = other RNA
accacctgagggagtggagaa

SEQ ID NO: 17355 - RNA, 21 nt, synthetic construct
  source 1..21: mol_type = other RNA
accagaggaacacagcattga

SEQ ID NO: 17356 - RNA, 21 nt, synthetic construct
  source 1..21: mol_type = other RNA
accagcatgggcaatacatta

SEQ ID NO: 17357 - RNA, 21 nt, synthetic construct
  source 1..21: mol_type = other RNA
accatagcattgaatgtgtag

SEQ ID NO: 17358 - RNA, 21 nt, synthetic construct
  source 1..21: mol_type = other RNA
accatccttgtatattgtcac

SEQ ID NO: 17359 - RNA, 21 nt, synthetic construct
  source 1..21: mol_type = other RNA
accatgtgctcgttgaaggaa

SEQ ID NO: 17360 - RNA, 21 nt, synthetic construct
  source 1..21: mol_type = other RNA
acccaacaaaaaagtttattt

SEQ ID NO: 17361 - RNA, 21 nt, synthetic construct
  source 1..21: mol_type = other RNA
acctaccaaccttaccttttc

SEQ ID NO: 17362 - RNA, 21 nt, synthetic construct
  source 1..21: mol_type = other RNA
acctagacttcttaactctat

SEQ ID NO: 17363 - RNA, 21 nt, synthetic construct
  source 1..21: mol_type = other RNA
acctattaagttagttgctca

SEQ ID NO: 17364 - RNA, 21 nt, synthetic construct
  source 1..21: mol_type = other RNA
acctgagggagtggagaaagg

SEQ ID NO: 17365 - RNA, 21 nt, synthetic construct
  source 1..21: mol_type = other RNA
acctgtttttaaaagctaatt

SEQ ID NO: 17366 - RNA, 21 nt, synthetic construct
  source 1..21: mol_type = other RNA
accttaccttttctgggcaaa

SEQ ID NO: 17367 - RNA, 21 nt, synthetic construct
  source 1..21: mol_type = other RNA
accttatatgtcttaaccatc

SEQ ID NO: 17368 - RNA, 21 nt, synthetic construct
  source 1..21: mol_type = other RNA
accttcaatgtcacaagcagc

SEQ ID NO: 17369 - RNA, 21 nt, synthetic construct
  source 1..21: mol_type = other RNA
accttcttccacattgagtta

SEQ ID NO: 17370 - RNA, 21 nt, synthetic construct
  source 1..21: mol_type = other RNA
accttttctgggcaaatattg

SEQ ID NO: 17371 - RNA, 21 nt, synthetic construct
  source 1..21: mol_type = other RNA
acgaatgtaaccttcttccac

SEQ ID NO: 17372 - RNA, 21 nt, synthetic construct
  source 1..21: mol_type = other RNA
acgagcacatggtaaagagcc

SEQ ID NO: 17373 - RNA, 21 nt, synthetic construct
  source 1..21: mol_type = other RNA
acggctctcaatgctgtgttc

SEQ ID NO: 17374 - RNA, 21 nt, synthetic construct
  source 1..21: mol_type = other RNA
acggcttaatgattaactatg

SEQ ID NO: 17375 - RNA, 21 nt, synthetic construct
  source 1..21: mol_type = other RNA
acgtggaactgttttcttctg

SEQ ID NO: 17376 - RNA, 21 nt, synthetic construct
  source 1..21: mol_type = other RNA
acgttgcttgaaattgaaaat

SEQ ID NO: 17377 - RNA, 21 nt, synthetic construct
  source 1..21: mol_type = other RNA
actaaagtacagtttgagaaa

SEQ ID NO: 17378 - RNA, 21 nt, synthetic construct
  source 1..21: mol_type = other RNA
actaacttaataggtaatttg

SEQ ID NO: 17379 - RNA, 21 nt, synthetic construct
  source 1..21: mol_type = other RNA
actaagctaacaaacttcaga

SEQ ID NO: 17380 - RNA, 21 nt, synthetic construct
  source 1..21: mol_type = other RNA
actacacattcaatgctatgg

SEQ ID NO: 17381 - RNA, 21 nt, synthetic construct
  source 1..21: mol_type = other RNA
actacctgtttttaaaagcta

SEQ ID NO: 17382 - RNA, 21 nt, synthetic construct
  source 1..21: mol_type = other RNA
actatatatgggattttgtga

SEQ ID NO: 17383 - RNA, 21 nt, synthetic construct
  source 1..21: mol_type = other RNA
actatgttcacctaccaacct

SEQ ID NO: 17384 - RNA, 21 nt, synthetic construct
  source 1..21: mol_type = other RNA
actcaatgtggaagaaggtta

SEQ ID NO: 17385 - RNA, 21 nt, synthetic construct
  source 1..21: mol_type = other RNA
actccctcaggtggtgttacg

SEQ ID NO: 17386 - RNA, 21 nt, synthetic construct
  source 1..21: mol_type = other RNA
actcccttttctccactgtgt

SEQ ID NO: 17387 - RNA, 21 nt, synthetic construct
  source 1..21: mol_type = other RNA
actctgtataaatcaatgtat

SEQ ID NO: 17388 - RNA, 21 nt, synthetic construct
  source 1..21: mol_type = other RNA
actgggctcaagcaattcttt

SEQ ID NO: 17389 - RNA, 21 nt, synthetic construct
  source 1..21: mol_type = other RNA
actgtactttagttcttttgg

SEQ ID NO: 17390 - RNA, 21 nt, synthetic construct
  source 1..21: mol_type = other RNA
actgtgttctgtgtctctgtg

SEQ ID NO: 17391 - RNA, 21 nt, synthetic construct
  source 1..21: mol_type = other RNA
actgtttccaaaagaactaaa

SEQ ID NO: 17392 - RNA, 21 nt, synthetic construct
  source 1..21: mol_type = other RNA
actgttttcttctggaagcag

SEQ ID NO: 17393 - RNA, 21 nt, synthetic construct
  source 1..21: mol_type = other RNA
acttactatatatgggatttt

SEQ ID NO: 17394 - RNA, 21 nt, synthetic construct
  source 1..21: mol_type = other RNA
acttatgatgggcaagctgct

SEQ ID NO: 17395 - RNA, 21 nt, synthetic construct
  source 1..21: mol_type = other RNA
acttcagaaaaacttatgatg

SEQ ID NO: 17396 - RNA, 21 nt, synthetic construct
  source 1..21: mol_type = other RNA
acttcttaactctatatatac

SEQ ID NO: 17397 - RNA, 21 nt, synthetic construct
  source 1..21: mol_type = other RNA
acttgcacgaatgtaaccttc

SEQ ID NO: 17398 - RNA, 21 nt, synthetic construct
  source 1..21: mol_type = other RNA
acttgtaaatctcttaaaatc

SEQ ID NO: 17399 - RNA, 21 nt, synthetic construct
  source 1..21: mol_type = other RNA
actttagttcttttggaaaca

SEQ ID NO: 17400 - RNA, 21 nt, synthetic construct
  source 1..21: mol_type = other RNA
actttctctctgaagcctttc

SEQ ID NO: 17401 - RNA, 21 nt, synthetic construct
  source 1..21: mol_type = other RNA
actttgctgtattataaacta

SEQ ID NO: 17402 - RNA, 21 nt, synthetic construct
  source 1..21: mol_type = other RNA
acttttttcccctcaacttta

SEQ ID NO: 17403 - RNA, 21 nt, synthetic construct
  source 1..21: mol_type = other RNA
acttttttgttgggtaaattt

SEQ ID NO: 17404 - RNA, 21 nt, synthetic construct
  source 1..21: mol_type = other RNA
agaaaaacttatgatgggcaa

SEQ ID NO: 17405 - RNA, 21 nt, synthetic construct
  source 1..21: mol_type = other RNA
agaaaacagttccacgttgct

SEQ ID NO: 17406 - RNA, 21 nt, synthetic construct
  source 1..21: mol_type = other RNA
agaaaagggagtgaaatgtct

SEQ ID NO: 17407 - RNA, 21 nt, synthetic construct
  source 1..21: mol_type = other RNA
agaaaaggtaaggttggtagg

SEQ ID NO: 17408 - RNA, 21 nt, synthetic construct
  source 1..21: mol_type = other RNA
agaaaggcttcagagagaaag

SEQ ID NO: 17409 - RNA, 21 nt, synthetic construct
  source 1..21: mol_type = other RNA
agaaagtgttttttggaatgg

SEQ ID NO: 17410 - RNA, 21 nt, synthetic construct
  source 1..21: mol_type = other RNA
agaaatgagcaactaacttaa

SEQ ID NO: 17411 - RNA, 21 nt, synthetic construct
  source 1..21: mol_type = other RNA
agaaatgcatacttaattcat

SEQ ID NO: 17412 - RNA, 21 nt, synthetic construct
  source 1..21: mol_type = other RNA
agaacacagagacacagaaca

SEQ ID NO: 17413 - RNA, 21 nt, synthetic construct
  source 1..21: mol_type = other RNA
agaacacagtggagaaaaggg

SEQ ID NO: 17414 - RNA, 21 nt, synthetic construct
  source 1..21: mol_type = other RNA
agaactaaagtacagtttgag

SEQ ID NO: 17415 - RNA, 21 nt, synthetic construct
  source 1..21: mol_type = other RNA
agaagaaaacagttccacgtt

SEQ ID NO: 17416 - RNA, 21 nt, synthetic construct
  source 1..21: mol_type = other RNA
agaaggttacattcgtgcaag

SEQ ID NO: 17417 - RNA, 21 nt, synthetic construct
  source 1..21: mol_type = other RNA
agaagtctaggtctgcttcca

SEQ ID NO: 17418 - RNA, 21 nt, synthetic construct
  source 1..21: mol_type = other RNA
agaattgaatcttaaatacct

SEQ ID NO: 17419 - RNA, 21 nt, synthetic construct
  source 1..21: mol_type = other RNA
agaattgcttgagcccagtat

SEQ ID NO: 17420 - RNA, 21 nt, synthetic construct
  source 1..21: mol_type = other RNA
agacacagaacacagtggaga

SEQ ID NO: 17421 - RNA, 21 nt, synthetic construct
  source 1..21: mol_type = other RNA
agacatataaggtgatgcaaa

SEQ ID NO: 17422 - RNA, 21 nt, synthetic construct
  source 1..21: mol_type = other RNA
agacatttcactcccttttct

SEQ ID NO: 17423 - RNA, 21 nt, synthetic construct
  source 1..21: mol_type = other RNA
agaccagcatgggcaatacat

SEQ ID NO: 17424 - RNA, 21 nt, synthetic construct
  source 1..21: mol_type = other RNA
agacctagacttcttaactct

SEQ ID NO: 17425 - RNA, 21 nt, synthetic construct
  source 1..21: mol_type = other RNA
agacttcttaactctatatat

SEQ ID NO: 17426 - RNA, 21 nt, synthetic construct
  source 1..21: mol_type = other RNA
agagaaagtgttttttggaat

SEQ ID NO: 17427 - RNA, 21 nt, synthetic construct
  source 1..21: mol_type = other RNA
agagacacagaacacagtgga

SEQ ID NO: 17428 - RNA, 21 nt, synthetic construct
  source 1..21: mol_type = other RNA
agagagaaagtgttttttgga

SEQ ID NO: 17429 - RNA, 21 nt, synthetic construct
  source 1..21: mol_type = other RNA
agagatttacaagtcaaaaat

SEQ ID NO: 17430 - RNA, 21 nt, synthetic construct
  source 1..21: mol_type = other RNA
agagccgtaacaccacctgag

SEQ ID NO: 17431 - RNA, 21 nt, synthetic construct
  source 1..21: mol_type = other RNA
agagcctagaacacagagaca

SEQ ID NO: 17432 - RNA, 21 nt, synthetic construct
  source 1..21: mol_type = other RNA
agaggaacacagcattgagag

SEQ ID NO: 17433 - RNA, 21 nt, synthetic construct
  source 1..21: mol_type = other RNA
agaggagattaataacatttt

SEQ ID NO: 17434 - RNA, 21 nt, synthetic construct
  source 1..21: mol_type = other RNA
agagtaccagaggaacacagc

SEQ ID NO: 17435 - RNA, 21 nt, synthetic construct
  source 1..21: mol_type = other RNA
agagttaagaagtctaggtct

SEQ ID NO: 17436 - RNA, 21 nt, synthetic construct
  source 1..21: mol_type = other RNA
agatcaatgctaaatgaaatc

SEQ ID NO: 17437 - RNA, 21 nt, synthetic construct
  source 1..21: mol_type = other RNA
agatgaccacatatccattgt

SEQ ID NO: 17438 - RNA, 21 nt, synthetic construct
  source 1..21: mol_type = other RNA
agatgatgtcttaatgtattg

SEQ ID NO: 17439 - RNA, 21 nt, synthetic construct
  source 1..21: mol_type = other RNA
agattcaattctagtttggtc

SEQ ID NO: 17440 - RNA, 21 nt, synthetic construct
  source 1..21: mol_type = other RNA
agcaaagttaaatacaatttc

SEQ ID NO: 17441 - RNA, 21 nt, synthetic construct
  source 1..21: mol_type = other RNA
agcaacgtggaactgttttct

SEQ ID NO: 17442 - RNA, 21 nt, synthetic construct
  source 1..21: mol_type = other RNA
agcaactaacttaataggtaa

SEQ ID NO: 17443 - RNA, 21 nt, synthetic construct
  source 1..21: mol_type = other RNA
agcacatggtaaagagcctag

SEQ ID NO: 17444 - RNA, 21 nt, synthetic construct
  source 1..21: mol_type = other RNA
agcagacctagacttcttaac

SEQ ID NO: 17445 - RNA, 21 nt, synthetic construct
  source 1..21: mol_type = other RNA
agcagcttgcccatcataagt

SEQ ID NO: 17446 - RNA, 21 nt, synthetic construct
  source 1..21: mol_type = other RNA
agcatgggcaatacattaaga

SEQ ID NO: 17447 - RNA, 21 nt, synthetic construct
  source 1..21: mol_type = other RNA
agcattgaatgtgtagtttat

SEQ ID NO: 17448 - RNA, 21 nt, synthetic construct
  source 1..21: mol_type = other RNA
agcattgagagccgtaacacc

SEQ ID NO: 17449 - RNA, 21 nt, synthetic construct
  source 1..21: mol_type = other RNA
agcattgatctaactcaatgt

SEQ ID NO: 17450 - RNA, 21 nt, synthetic construct
  source 1..21: mol_type = other RNA
agcccagtatttccagaccag

SEQ ID NO: 17451 - RNA, 21 nt, synthetic construct
  source 1..21: mol_type = other RNA
agccgtaacaccacctgaggg

SEQ ID NO: 17452 - RNA, 21 nt, synthetic construct
  source 1..21: mol_type = other RNA
agccgtgttaacttgcacgaa

SEQ ID NO: 17453 - RNA, 21 nt, synthetic construct
  source 1..21: mol_type = other RNA
agcctagaacacagagacaca

SEQ ID NO: 17454 - RNA, 21 nt, synthetic construct
  source 1..21: mol_type = other RNA
agcctttctccactccctcag

SEQ ID NO: 17455 - RNA, 21 nt, synthetic construct
  source 1..21: mol_type = other RNA
agctaacaaacttcagaaaaa

SEQ ID NO: 17456 - RNA, 21 nt, synthetic construct
  source 1..21: mol_type = other RNA
agctgcttgtgacattgaagg

SEQ ID NO: 17457 - RNA, 21 nt, synthetic construct
  source 1..21: mol_type = other RNA
agcttagtaacaattttgata

SEQ ID NO: 17458 - RNA, 21 nt, synthetic construct
  source 1..21: mol_type = other RNA
agcttgcccatcataagtttt

SEQ ID NO: 17459 - RNA, 21 nt, synthetic construct
  source 1..21: mol_type = other RNA
agcttttaaaaacaggtagtc

SEQ ID NO: 17460 - RNA, 21 nt, synthetic construct
  source 1..21: mol_type = other RNA
aggaacaatggatatgtggtc

SEQ ID NO: 17461 - RNA, 21 nt, synthetic construct
  source 1..21: mol_type = other RNA
aggaacacagcattgagagcc

SEQ ID NO: 17462 - RNA, 21 nt, synthetic construct
  source 1..21: mol_type = other RNA
aggaccaaactagaattgaat

SEQ ID NO: 17463 - RNA, 21 nt, synthetic construct
  source 1..21: mol_type = other RNA
aggagcatataattatacatt

SEQ ID NO: 17464 - RNA, 21 nt, synthetic construct
  source 1..21: mol_type = other RNA
aggatggttaagacatataag

SEQ ID NO: 17465 - RNA, 21 nt, synthetic construct
  source 1..21: mol_type = other RNA
aggccaaggtaaaagaattgc

SEQ ID NO: 17466 - RNA, 21 nt, synthetic construct
  source 1..21: mol_type = other RNA
aggctctttaccatgtgctcg

SEQ ID NO: 17467 - RNA, 21 nt, synthetic construct
  source 1..21: mol_type = other RNA
aggcttcagagagaaagtgtt

SEQ ID NO: 17468 - RNA, 21 nt, synthetic construct
  source 1..21: mol_type = other RNA
agggagtgaaatgtctttaat

SEQ ID NO: 17469 - RNA, 21 nt, synthetic construct
  source 1..21: mol_type = other RNA
agggagtggagaaaggcttca

SEQ ID NO: 17470 - RNA, 21 nt, synthetic construct
  source 1..21: mol_type = other RNA
aggggaaaaaagtaatgaatt

SEQ ID NO: 17471 - RNA, 21 nt, synthetic construct
  source 1..21: mol_type = other RNA
aggtaaaagaattgcttgagc

SEQ ID NO: 17472 - RNA, 21 nt, synthetic construct
  source 1..21: mol_type = other RNA
aggtaaggttggtaggtgaac

SEQ ID NO: 17473 - RNA, 21 nt, synthetic construct
  source 1..21: mol_type = other RNA
aggtagtcaccatagcattga

SEQ ID NO: 17474 - RNA, 21 nt, synthetic construct
  source 1..21: mol_type = other RNA
aggtatttaagattcaattct

SEQ ID NO: 17475 - RNA, 21 nt, synthetic construct
  source 1..21: mol_type = other RNA
aggtctgcttccagaagaaaa

SEQ ID NO: 17476 - RNA, 21 nt, synthetic construct
  source 1..21: mol_type = other RNA
aggtgaacatagttaatcatt

SEQ ID NO: 17477 - RNA, 21 nt, synthetic construct
  source 1..21: mol_type = other RNA
aggtggtgttacggctctcaa

SEQ ID NO: 17478 - RNA, 21 nt, synthetic construct
  source 1..21: mol_type = other RNA
aggttacattcgtgcaagtta

SEQ ID NO: 17479 - RNA, 21 nt, synthetic construct
  source 1..21: mol_type = other RNA
aggttggtaggtgaacatagt

SEQ ID NO: 17480 - RNA, 21 nt, synthetic construct
  source 1..21: mol_type = other RNA
agtaagtgtcattaaagacat

SEQ ID NO: 17481 - RNA, 21 nt, synthetic construct
  source 1..21: mol_type = other RNA
agtaatgaattaagtatgcat

SEQ ID NO: 17482 - RNA, 21 nt, synthetic construct
  source 1..21: mol_type = other RNA
agtacagtttgagaaatgcat

SEQ ID NO: 17483 - RNA, 21 nt, synthetic construct
  source 1..21: mol_type = other RNA
agtaccagaggaacacagcat

SEQ ID NO: 17484 - RNA, 21 nt, synthetic construct
  source 1..21: mol_type = other RNA
agtatgcatttctcaaactgt

SEQ ID NO: 17485 - RNA, 21 nt, synthetic construct
  source 1..21: mol_type = other RNA
agtatttccagaccagcatgg

SEQ ID NO: 17486 - RNA, 21 nt, synthetic construct
  source 1..21: mol_type = other RNA
agtcaccatagcattgaatgt

SEQ ID NO: 17487 - RNA, 21 nt, synthetic construct
  source 1..21: mol_type = other RNA
agtctaggtctgcttccagaa

SEQ ID NO: 17488 - RNA, 21 nt, synthetic construct
  source 1..21: mol_type = other RNA
agtgaaatgtctttaatgaca

SEQ ID NO: 17489 - RNA, 21 nt, synthetic construct
  source 1..21: mol_type = other RNA
agtgacaaaaaatgaggagca

SEQ ID NO: 17490 - RNA, 21 nt, synthetic construct
  source 1..21: mol_type = other RNA
agtgatccattccaaaaaaca

SEQ ID NO: 17491 - RNA, 21 nt, synthetic construct
  source 1..21: mol_type = other RNA
agtggagaaaagggagtgaaa

SEQ ID NO: 17492 - RNA, 21 nt, synthetic construct
  source 1..21: mol_type = other RNA
agtggagaaaggcttcagaga

SEQ ID NO: 17493 - RNA, 21 nt, synthetic construct
  source 1..21: mol_type = other RNA
agtgtcattaaagacatttca

SEQ ID NO: 17494 - RNA, 21 nt, synthetic construct
  source 1..21: mol_type = other RNA
agtgttttttggaatggatca

SEQ ID NO: 17495 - RNA, 21 nt, synthetic construct
  source 1..21: mol_type = other RNA
agttaacacggcttaatgatt

SEQ ID NO: 17496 - RNA, 21 nt, synthetic construct
  source 1..21: mol_type = other RNA
agttaagaagtctaggtctgc

SEQ ID NO: 17497 - RNA, 21 nt, synthetic construct
  source 1..21: mol_type = other RNA
agttaatcattaagccgtgtt

SEQ ID NO: 17498 - RNA, 21 nt, synthetic construct
  source 1..21: mol_type = other RNA
agttagatcaatgctaaatga

SEQ ID NO: 17499 - RNA, 21 nt, synthetic construct
  source 1..21: mol_type = other RNA
agttagttgctcatttctttg

SEQ ID NO: 17500 - RNA, 21 nt, synthetic construct
  source 1..21: mol_type = other RNA
agttccacgttgcttgaaatt

SEQ ID NO: 17501 - RNA, 21 nt, synthetic construct
  source 1..21: mol_type = other RNA
agttcttttggaaacagtgat

SEQ ID NO: 17502 - RNA, 21 nt, synthetic construct
  source 1..21: mol_type = other RNA
agttgaggggaaaaaagtaat

SEQ ID NO: 17503 - RNA, 21 nt, synthetic construct
  source 1..21: mol_type = other RNA
agttgctcatttctttgattt

SEQ ID NO: 17504 - RNA, 21 nt, synthetic construct
  source 1..21: mol_type = other RNA
agtttataatacagcaaagtt

SEQ ID NO: 17505 - RNA, 21 nt, synthetic construct
  source 1..21: mol_type = other RNA
agtttgagaaatgcatactta

SEQ ID NO: 17506 - RNA, 21 nt, synthetic construct
  source 1..21: mol_type = other RNA
agtttggtcctagatgaccac

SEQ ID NO: 17507 - RNA, 21 nt, synthetic construct
  source 1..21: mol_type = other RNA
agtttgttagcttagtaacaa

SEQ ID NO: 17508 - RNA, 21 nt, synthetic construct
  source 1..21: mol_type = other RNA
agtttttctgaagtttgttag

SEQ ID NO: 17509 - RNA, 21 nt, synthetic construct
  source 1..21: mol_type = other RNA
ataaactacacattcaatgct

SEQ ID NO: 17510 - RNA, 21 nt, synthetic construct
  source 1..21: mol_type = other RNA
ataaacttttttgttgggtaa

SEQ ID NO: 17511 - RNA, 21 nt, synthetic construct
  source 1..21: mol_type = other RNA
ataagtttttctgaagtttgt

SEQ ID NO: 17512 - RNA, 21 nt, synthetic construct
  source 1..21: mol_type = other RNA
ataattatatgctcctcattt

SEQ ID NO: 17513 - RNA, 21 nt, synthetic construct
  source 1..21: mol_type = other RNA
atacaaggatggttaagacat

SEQ ID NO: 17514 - RNA, 21 nt, synthetic construct
  source 1..21: mol_type = other RNA
atacagagtaccagaggaaca

SEQ ID NO: 17515 - RNA, 21 nt, synthetic construct
  source 1..21: mol_type = other RNA
atacagcaaagttaaatacaa

SEQ ID NO: 17516 - RNA, 21 nt, synthetic construct
  source 1..21: mol_type = other RNA
atacattaagacatcatcttt

SEQ ID NO: 17517 - RNA, 21 nt, synthetic construct
  source 1..21: mol_type = other RNA
atacattgatttatacagagt

SEQ ID NO: 17518 - RNA, 21 nt, synthetic construct
  source 1..21: mol_type = other RNA
atacatttaacaaaaagagga

SEQ ID NO: 17519 - RNA, 21 nt, synthetic construct
  source 1..21: mol_type = other RNA
ataccaatatttgcccagaaa

SEQ ID NO: 17520 - RNA, 21 nt, synthetic construct
  source 1..21: mol_type = other RNA
ataccttcaatgtcacaagca

SEQ ID NO: 17521 - RNA, 21 nt, synthetic construct
  source 1..21: mol_type = other RNA
atactgggctcaagcaattct

SEQ ID NO: 17522 - RNA, 21 nt, synthetic construct
  source 1..21: mol_type = other RNA
atagagttaagaagtctaggt

SEQ ID NO: 17523 - RNA, 21 nt, synthetic construct
  source 1..21: mol_type = other RNA
atagcattgaatgtgtagttt

SEQ ID NO: 17524 - RNA, 21 nt, synthetic construct
  source 1..21: mol_type = other RNA
atagtaagtgtcattaaagac

SEQ ID NO: 17525 - RNA, 21 nt, synthetic construct
  source 1..21: mol_type = other RNA
atagtgacaaaaaatgaggag

SEQ ID NO: 17526 - RNA, 21 nt, synthetic construct
  source 1..21: mol_type = other RNA
atagttaatcattaagccgtg

SEQ ID NO: 17527 - RNA, 21 nt, synthetic construct
  source 1..21: mol_type = other RNA
atatacaaggatggttaagac

SEQ ID NO: 17528 - RNA, 21 nt, synthetic construct
  source 1..21: mol_type = other RNA
atataccaatatttgcccaga

SEQ ID NO: 17529 - RNA, 21 nt, synthetic construct
  source 1..21: mol_type = other RNA
atatagagttaagaagtctag

SEQ ID NO: 17530 - RNA, 21 nt, synthetic construct
  source 1..21: mol_type = other RNA
atatagtaagtgtcattaaag

SEQ ID NO: 17531 - RNA, 21 nt, synthetic construct
  source 1..21: mol_type = other RNA
atatataccaatatttgccca

SEQ ID NO: 17532 - RNA, 21 nt, synthetic construct
  source 1..21: mol_type = other RNA
atatatagagttaagaagtct

SEQ ID NO: 17533 - RNA, 21 nt, synthetic construct
  source 1..21: mol_type = other RNA
atatatgggattttgtgacaa

SEQ ID NO: 17534 - RNA, 21 nt, synthetic construct
  source 1..21: mol_type = other RNA
atatccattgttccttcaacg

SEQ ID NO: 17535 - RNA, 21 nt, synthetic construct
  source 1..21: mol_type = other RNA
atatgctcctcattttttgtc

SEQ ID NO: 17536 - RNA, 21 nt, synthetic construct
  source 1..21: mol_type = other RNA
atatgggattttgtgacaata

SEQ ID NO: 17537 - RNA, 21 nt, synthetic construct
  source 1..21: mol_type = other RNA
atatgtcttaaccatccttgt

SEQ ID NO: 17538 - RNA, 21 nt, synthetic construct
  source 1..21: mol_type = other RNA
atatgtggtcatctaggacca

SEQ ID NO: 17539 - RNA, 21 nt, synthetic construct
  source 1..21: mol_type = other RNA
atattgtcacaaaatcccata

SEQ ID NO: 17540 - RNA, 21 nt, synthetic construct
  source 1..21: mol_type = other RNA
atatttgcccagaaaaggtaa

SEQ ID NO: 17541 - RNA, 21 nt, synthetic construct
  source 1..21: mol_type = other RNA
atcaaaattgttactaagcta

SEQ ID NO: 17542 - RNA, 21 nt, synthetic construct
  source 1..21: mol_type = other RNA
atcaaagaaatgagcaactaa

SEQ ID NO: 17543 - RNA, 21 nt, synthetic construct
  source 1..21: mol_type = other RNA
atcaatgctaaatgaaatcaa

SEQ ID NO: 17544 - RNA, 21 nt, synthetic construct
  source 1..21: mol_type = other RNA
atcaccttatatgtcttaacc

SEQ ID NO: 17545 - RNA, 21 nt, synthetic construct
  source 1..21: mol_type = other RNA
atcactgtttccaaaagaact

SEQ ID NO: 17546 - RNA, 21 nt, synthetic construct
  source 1..21: mol_type = other RNA
atcataagtttttctgaagtt

SEQ ID NO: 17547 - RNA, 21 nt, synthetic construct
  source 1..21: mol_type = other RNA
atcattaagccgtgttaactt

SEQ ID NO: 17548 - RNA, 21 nt, synthetic construct
  source 1..21: mol_type = other RNA
atccattccaaaaaacacttt

SEQ ID NO: 17549 - RNA, 21 nt, synthetic construct
  source 1..21: mol_type = other RNA
atccattgttccttcaacgag

SEQ ID NO: 17550 - RNA, 21 nt, synthetic construct
  source 1..21: mol_type = other RNA
atcccatatatagtaagtgtc

SEQ ID NO: 17551 - RNA, 21 nt, synthetic construct
  source 1..21: mol_type = other RNA
atccttgtatattgtcacaaa

SEQ ID NO: 17552 - RNA, 21 nt, synthetic construct
  source 1..21: mol_type = other RNA
atctaactcaatgtggaagaa

SEQ ID NO: 17553 - RNA, 21 nt, synthetic construct
  source 1..21: mol_type = other RNA
atctaggaccaaactagaatt

SEQ ID NO: 17554 - RNA, 21 nt, synthetic construct
  source 1..21: mol_type = other RNA
atctcctctttttgttaaatg

SEQ ID NO: 17555 - RNA, 21 nt, synthetic construct
  source 1..21: mol_type = other RNA
atcttaaataccttcaatgtc

SEQ ID NO: 17556 - RNA, 21 nt, synthetic construct
  source 1..21: mol_type = other RNA
atcttgattttcaatttcaag

SEQ ID NO: 17557 - RNA, 21 nt, synthetic construct
  source 1..21: mol_type = other RNA
atgaaatcaaagaaatgagca

SEQ ID NO: 17558 - RNA, 21 nt, synthetic construct
  source 1..21: mol_type = other RNA
atgaattaagtatgcatttct

SEQ ID NO: 17559 - RNA, 21 nt, synthetic construct
  source 1..21: mol_type = other RNA
atgacacttactatatatggg

SEQ ID NO: 17560 - RNA, 21 nt, synthetic construct
  source 1..21: mol_type = other RNA
atgaccacatatccattgttc

SEQ ID NO: 17561 - RNA, 21 nt, synthetic construct
  source 1..21: mol_type = other RNA
atgagcaactaacttaatagg

SEQ ID NO: 17562 - RNA, 21 nt, synthetic construct
  source 1..21: mol_type = other RNA
atgaggagcatataattatac

SEQ ID NO: 17563 - RNA, 21 nt, synthetic construct
  source 1..21: mol_type = other RNA
atgatgggcaagctgcttgtg

SEQ ID NO: 17564 - RNA, 21 nt, synthetic construct
  source 1..21: mol_type = other RNA
atgatgtcttaatgtattgcc

SEQ ID NO: 17565 - RNA, 21 nt, synthetic construct
  source 1..21: mol_type = other RNA
atgattaactatgttcaccta

SEQ ID NO: 17566 - RNA, 21 nt, synthetic construct
  source 1..21: mol_type = other RNA
atgcatacttaattcattact

SEQ ID NO: 17567 - RNA, 21 nt, synthetic construct
  source 1..21: mol_type = other RNA
atgcatttctcaaactgtact

SEQ ID NO: 17568 - RNA, 21 nt, synthetic construct
  source 1..21: mol_type = other RNA
atgctaaatgaaatcaaagaa

SEQ ID NO: 17569 - RNA, 21 nt, synthetic construct
  source 1..21: mol_type = other RNA
atgctatggtgactacctgtt

SEQ ID NO: 17570 - RNA, 21 nt, synthetic construct
  source 1..21: mol_type = other RNA
atgctcctcattttttgtcac

SEQ ID NO: 17571 - RNA, 21 nt, synthetic construct
  source 1..21: mol_type = other RNA
atgctggtctggaaatactgg

SEQ ID NO: 17572 - RNA, 21 nt, synthetic construct
  source 1..21: mol_type = other RNA
atgctgtgttcctctggtact

SEQ ID NO: 17573 - RNA, 21 nt, synthetic construct
  source 1..21: mol_type = other RNA
atggatatgtggtcatctagg

SEQ ID NO: 17574 - RNA, 21 nt, synthetic construct
  source 1..21: mol_type = other RNA
atggatcactgtttccaaaag

SEQ ID NO: 17575 - RNA, 21 nt, synthetic construct
  source 1..21: mol_type = other RNA
atgggattttgtgacaatata

SEQ ID NO: 17576 - RNA, 21 nt, synthetic construct
  source 1..21: mol_type = other RNA
atgggcaagctgcttgtgaca

SEQ ID NO: 17577 - RNA, 21 nt, synthetic construct
  source 1..21: mol_type = other RNA
atgggcaatacattaagacat

SEQ ID NO: 17578 - RNA, 21 nt, synthetic construct
  source 1..21: mol_type = other RNA
atggtaaagagcctagaacac

SEQ ID NO: 17579 - RNA, 21 nt, synthetic construct
  source 1..21: mol_type = other RNA
atggtgactacctgtttttaa

SEQ ID NO: 17580 - RNA, 21 nt, synthetic construct
  source 1..21: mol_type = other RNA
atggttaagacatataaggtg

SEQ ID NO: 17581 - RNA, 21 nt, synthetic construct
  source 1..21: mol_type = other RNA
atgtaaccttcttccacattg

SEQ ID NO: 17582 - RNA, 21 nt, synthetic construct
  source 1..21: mol_type = other RNA
atgtataattatatgctcctc

SEQ ID NO: 17583 - RNA, 21 nt, synthetic construct
  source 1..21: mol_type = other RNA
atgtattgcccatgctggtct

SEQ ID NO: 17584 - RNA, 21 nt, synthetic construct
  source 1..21: mol_type = other RNA
atgtcacaagcagcttgccca

SEQ ID NO: 17585 - RNA, 21 nt, synthetic construct
  source 1..21: mol_type = other RNA
atgtcttaaccatccttgtat

SEQ ID NO: 17586 - RNA, 21 nt, synthetic construct
  source 1..21: mol_type = other RNA
atgtcttaatgtattgcccat

SEQ ID NO: 17587 - RNA, 21 nt, synthetic construct
  source 1..21: mol_type = other RNA
atgtctttaatgacacttact

SEQ ID NO: 17588 - RNA, 21 nt, synthetic construct
  source 1..21: mol_type = other RNA
atgtgctcgttgaaggaacaa

SEQ ID NO: 17589 - RNA, 21 nt, synthetic construct
  source 1..21: mol_type = other RNA
atgtggaagaaggttacattc

SEQ ID NO: 17590 - RNA, 21 nt, synthetic construct
  source 1..21: mol_type = other RNA
atgtggtcatctaggaccaaa

SEQ ID NO: 17591 - RNA, 21 nt, synthetic construct
  source 1..21: mol_type = other RNA
atgtgtagtttataatacagc

SEQ ID NO: 17592 - RNA, 21 nt, synthetic construct
  source 1..21: mol_type = other RNA
atgttattaatctcctctttt

SEQ ID NO: 17593 - RNA, 21 nt, synthetic construct
  source 1..21: mol_type = other RNA
atgttcacctaccaaccttac

SEQ ID NO: 17594 - RNA, 21 nt, synthetic construct
  source 1..21: mol_type = other RNA
attaaagacatttcactccct

SEQ ID NO: 17595 - RNA, 21 nt, synthetic construct
  source 1..21: mol_type = other RNA
attaaagttgaggggaaaaaa

SEQ ID NO: 17596 - RNA, 21 nt, synthetic construct
  source 1..21: mol_type = other RNA
attaactatgttcacctacca

SEQ ID NO: 17597 - RNA, 21 nt, synthetic construct
  source 1..21: mol_type = other RNA
attaagccgtgttaacttgca

SEQ ID NO: 17598 - RNA, 21 nt, synthetic construct
  source 1..21: mol_type = other RNA
attaagtatgcatttctcaaa

SEQ ID NO: 17599 - RNA, 21 nt, synthetic construct
  source 1..21: mol_type = other RNA
attaagttagttgctcatttc

SEQ ID NO: 17600 - RNA, 21 nt, synthetic construct
  source 1..21: mol_type = other RNA
attaatctcctctttttgtta

SEQ ID NO: 17601 - RNA, 21 nt, synthetic construct
  source 1..21: mol_type = other RNA
attacctattaagttagttgc

SEQ ID NO: 17602 - RNA, 21 nt, synthetic construct
  source 1..21: mol_type = other RNA
attacttttttcccctcaact

SEQ ID NO: 17603 - RNA, 21 nt, synthetic construct
  source 1..21: mol_type = other RNA
attagcttttaaaaacaggta

SEQ ID NO: 17604 - RNA, 21 nt, synthetic construct
  source 1..21: mol_type = other RNA
attatagtgacaaaaaatgag

SEQ ID NO: 17605 - RNA, 21 nt, synthetic construct
  source 1..21: mol_type = other RNA
attatatgctcctcatttttt

SEQ ID NO: 17606 - RNA, 21 nt, synthetic construct
  source 1..21: mol_type = other RNA
attattaaagttgaggggaaa

SEQ ID NO: 17607 - RNA, 21 nt, synthetic construct
  source 1..21: mol_type = other RNA
attcaatgctatggtgactac

SEQ ID NO: 17608 - RNA, 21 nt, synthetic construct
  source 1..21: mol_type = other RNA
attcaattctagtttggtcct

SEQ ID NO: 17609 - RNA, 21 nt, synthetic construct
  source 1..21: mol_type = other RNA
attcattacttttttcccctc

SEQ ID NO: 17610 - RNA, 21 nt, synthetic construct
  source 1..21: mol_type = other RNA
attccaaaaaacactttctct

SEQ ID NO: 17611 - RNA, 21 nt, synthetic construct
  source 1..21: mol_type = other RNA
attcgtgcaagttaacacggc

SEQ ID NO: 17612 - RNA, 21 nt, synthetic construct
  source 1..21: mol_type = other RNA
attctagtttggtcctagatg

SEQ ID NO: 17613 - RNA, 21 nt, synthetic construct
  source 1..21: mol_type = other RNA
attgaaggtatttaagattca

SEQ ID NO: 17614 - RNA, 21 nt, synthetic construct
  source 1..21: mol_type = other RNA
attgaatcttaaataccttca

SEQ ID NO: 17615 - RNA, 21 nt, synthetic construct
  source 1..21: mol_type = other RNA
attgagagccgtaacaccacc

SEQ ID NO: 17616 - RNA, 21 nt, synthetic construct
  source 1..21: mol_type = other RNA
attgagttagatcaatgctaa

SEQ ID NO: 17617 - RNA, 21 nt, synthetic construct
  source 1..21: mol_type = other RNA
attgatctaactcaatgtgga

SEQ ID NO: 17618 - RNA, 21 nt, synthetic construct
  source 1..21: mol_type = other RNA
attgatttatacagagtacca

SEQ ID NO: 17619 - RNA, 21 nt, synthetic construct
  source 1..21: mol_type = other RNA
attgcccatgctggtctggaa

SEQ ID NO: 17620 - RNA, 21 nt, synthetic construct
  source 1..21: mol_type = other RNA
attgcttgagcccagtatttc

SEQ ID NO: 17621 - RNA, 21 nt, synthetic construct
  source 1..21: mol_type = other RNA
attggtatatatagagttaag

SEQ ID NO: 17622 - RNA, 21 nt, synthetic construct
  source 1..21: mol_type = other RNA
attgtatttaactttgctgta

SEQ ID NO: 17623 - RNA, 21 nt, synthetic construct
  source 1..21: mol_type = other RNA
attgtcacaaaatcccatata

SEQ ID NO: 17624 - RNA, 21 nt, synthetic construct
  source 1..21: mol_type = other RNA
attgttactaagctaacaaac

SEQ ID NO: 17625 - RNA, 21 nt, synthetic construct
  source 1..21: mol_type = other RNA
attgttccttcaacgagcaca

SEQ ID NO: 17626 - RNA, 21 nt, synthetic construct
  source 1..21: mol_type = other RNA
atttaacaaaaagaggagatt

SEQ ID NO: 17627 - RNA, 21 nt, synthetic construct
  source 1..21: mol_type = other RNA
atttacccaacaaaaaagttt

SEQ ID NO: 17628 - RNA, 21 nt, synthetic construct
  source 1..21: mol_type = other RNA
atttagcattgatctaactca

SEQ ID NO: 17629 - RNA, 21 nt, synthetic construct
  source 1..21: mol_type = other RNA
atttatacagagtaccagagg

SEQ ID NO: 17630 - RNA, 21 nt, synthetic construct
  source 1..21: mol_type = other RNA
atttattattaaagttgaggg

SEQ ID NO: 17631 - RNA, 21 nt, synthetic construct
  source 1..21: mol_type = other RNA
atttcaagcaacgtggaactg

SEQ ID NO: 17632 - RNA, 21 nt, synthetic construct
  source 1..21: mol_type = other RNA
atttcactcccttttctccac

SEQ ID NO: 17633 - RNA, 21 nt, synthetic construct
  source 1..21: mol_type = other RNA
atttcatttagcattgatcta

SEQ ID NO: 17634 - RNA, 21 nt, synthetic construct
  source 1..21: mol_type = other RNA
atttccagaccagcatgggca

SEQ ID NO: 17635 - RNA, 21 nt, synthetic construct
  source 1..21: mol_type = other RNA
atttctcaaactgtactttag

SEQ ID NO: 17636 - RNA, 21 nt, synthetic construct
  source 1..21: mol_type = other RNA
atttctttgatttcatttagc

SEQ ID NO: 17637 - RNA, 21 nt, synthetic construct
  source 1..21: mol_type = other RNA
atttgcccagaaaaggtaagg

SEQ ID NO: 17638 - RNA, 21 nt, synthetic construct
  source 1..21: mol_type = other RNA
attttaagagatttacaagtc

SEQ ID NO: 17639 - RNA, 21 nt, synthetic construct
  source 1..21: mol_type = other RNA
attttcaatttcaagcaacgt

SEQ ID NO: 17640 - RNA, 21 nt, synthetic construct
  source 1..21: mol_type = other RNA
attttgtgacaatatacaagg

SEQ ID NO: 17641 - RNA, 21 nt, synthetic construct
  source 1..21: mol_type = other RNA
atttttgacttgtaaatctct

SEQ ID NO: 17642 - RNA, 21 nt, synthetic construct
  source 1..21: mol_type = other RNA
caaaaaacactttctctctga

SEQ ID NO: 17643 - RNA, 21 nt, synthetic construct
  source 1..21: mol_type = other RNA
caaaaaatgaggagcatataa

SEQ ID NO: 17644 - RNA, 21 nt, synthetic construct
  source 1..21: mol_type = other RNA
caaaaagaggagattaataac

SEQ ID NO: 17645 - RNA, 21 nt, synthetic construct
  source 1..21: mol_type = other RNA
caaaagaactaaagtacagtt

SEQ ID NO: 17646 - RNA, 21 nt, synthetic construct
  source 1..21: mol_type = other RNA
caaaatcccatatatagtaag

SEQ ID NO: 17647 - RNA, 21 nt, synthetic construct
  source 1..21: mol_type = other RNA
caaaattgttactaagctaac

SEQ ID NO: 17648 - RNA, 21 nt, synthetic construct
  source 1..21: mol_type = other RNA
caaactagaattgaatcttaa

SEQ ID NO: 17649 - RNA, 21 nt, synthetic construct
  source 1..21: mol_type = other RNA
caaactgtactttagttcttt

SEQ ID NO: 17650 - RNA, 21 nt, synthetic construct
  source 1..21: mol_type = other RNA
caaacttcagaaaaacttatg

SEQ ID NO: 17651 - RNA, 21 nt, synthetic construct
  source 1..21: mol_type = other RNA
caaagaaatgagcaactaact

SEQ ID NO: 17652 - RNA, 21 nt, synthetic construct
  source 1..21: mol_type = other RNA
caaatattggtatatatagag

SEQ ID NO: 17653 - RNA, 21 nt, synthetic construct
  source 1..21: mol_type = other RNA
caaattacctattaagttagt

SEQ ID NO: 17654 - RNA, 21 nt, synthetic construct
  source 1..21: mol_type = other RNA
caaccttaccttttctgggca

SEQ ID NO: 17655 - RNA, 21 nt, synthetic construct
  source 1..21: mol_type = other RNA
caacgagcacatggtaaagag

SEQ ID NO: 17656 - RNA, 21 nt, synthetic construct
  source 1..21: mol_type = other RNA
caacgtggaactgttttcttc

SEQ ID NO: 17657 - RNA, 21 nt, synthetic construct
  source 1..21: mol_type = other RNA
caactaacttaataggtaatt

SEQ ID NO: 17658 - RNA, 21 nt, synthetic construct
  source 1..21: mol_type = other RNA
caagcaacgtggaactgtttt

SEQ ID NO: 17659 - RNA, 21 nt, synthetic construct
  source 1..21: mol_type = other RNA
caagcagcttgcccatcataa

SEQ ID NO: 17660 - RNA, 21 nt, synthetic construct
  source 1..21: mol_type = other RNA
caagctgcttgtgacattgaa

SEQ ID NO: 17661 - RNA, 21 nt, synthetic construct
  source 1..21: mol_type = other RNA
caaggatggttaagacatata

SEQ ID NO: 17662 - RNA, 21 nt, synthetic construct
  source 1..21: mol_type = other RNA
caaggtaaaagaattgcttga

SEQ ID NO: 17663 - RNA, 21 nt, synthetic construct
  source 1..21: mol_type = other RNA
caagttaacacggcttaatga

SEQ ID NO: 17664 - RNA, 21 nt, synthetic construct
  source 1..21: mol_type = other RNA
caatacattaagacatcatct

SEQ ID NO: 17665 - RNA, 21 nt, synthetic construct
  source 1..21: mol_type = other RNA
caatatacaaggatggttaag

SEQ ID NO: 17666 - RNA, 21 nt, synthetic construct
  source 1..21: mol_type = other RNA
caatatttgcccagaaaaggt

SEQ ID NO: 17667 - RNA, 21 nt, synthetic construct
  source 1..21: mol_type = other RNA
caatgctaaatgaaatcaaag

SEQ ID NO: 17668 - RNA, 21 nt, synthetic construct
  source 1..21: mol_type = other RNA
caatgctatggtgactacctg

SEQ ID NO: 17669 - RNA, 21 nt, synthetic construct
  source 1..21: mol_type = other RNA
caatgctgtgttcctctggta

SEQ ID NO: 17670 - RNA, 21 nt, synthetic construct
  source 1..21: mol_type = other RNA
caatggatatgtggtcatcta

SEQ ID NO: 17671 - RNA, 21 nt, synthetic construct
  source 1..21: mol_type = other RNA
caatgtataattatatgctcc

SEQ ID NO: 17672 - RNA, 21 nt, synthetic construct
  source 1..21: mol_type = other RNA
caatgtcacaagcagcttgcc

SEQ ID NO: 17673 - RNA, 21 nt, synthetic construct
  source 1..21: mol_type = other RNA
caatgtggaagaaggttacat

SEQ ID NO: 17674 - RNA, 21 nt, synthetic construct
  source 1..21: mol_type = other RNA
caattatagtgacaaaaaatg

SEQ ID NO: 17675 - RNA, 21 nt, synthetic construct
  source 1..21: mol_type = other RNA
caattctagtttggtcctaga

SEQ ID NO: 17676 - RNA, 21 nt, synthetic construct
  source 1..21: mol_type = other RNA
caatttcaagcaacgtggaac

SEQ ID NO: 17677 - RNA, 21 nt, synthetic construct
  source 1..21: mol_type = other RNA
cacaaaatcccatatatagta

SEQ ID NO: 17678 - RNA, 21 nt, synthetic construct
  source 1..21: mol_type = other RNA
cacaagcagcttgcccatcat

SEQ ID NO: 17679 - RNA, 21 nt, synthetic construct
  source 1..21: mol_type = other RNA
cacagaacacagtggagaaaa

SEQ ID NO: 17680 - RNA, 21 nt, synthetic construct
  source 1..21: mol_type = other RNA
cacagagacacagaacacagt

SEQ ID NO: 17681 - RNA, 21 nt, synthetic construct
  source 1..21: mol_type = other RNA
cacagcattgagagccgtaac

SEQ ID NO: 17682 - RNA, 21 nt, synthetic construct
  source 1..21: mol_type = other RNA
cacagtggagaaaagggagtg

SEQ ID NO: 17683 - RNA, 21 nt, synthetic construct
  source 1..21: mol_type = other RNA
cacatatccattgttccttca

SEQ ID NO: 17684 - RNA, 21 nt, synthetic construct
  source 1..21: mol_type = other RNA
cacatggtaaagagcctagaa

SEQ ID NO: 17685 - RNA, 21 nt, synthetic construct
  source 1..21: mol_type = other RNA
cacattcaatgctatggtgac

SEQ ID NO: 17686 - RNA, 21 nt, synthetic construct
  source 1..21: mol_type = other RNA
cacattgagttagatcaatgc

SEQ ID NO: 17687 - RNA, 21 nt, synthetic construct
  source 1..21: mol_type = other RNA
caccacctgagggagtggaga

SEQ ID NO: 17688 - RNA, 21 nt, synthetic construct
  source 1..21: mol_type = other RNA
caccatagcattgaatgtgta

SEQ ID NO: 17689 - RNA, 21 nt, synthetic construct
  source 1..21: mol_type = other RNA
cacctaccaaccttacctttt

SEQ ID NO: 17690 - RNA, 21 nt, synthetic construct
  source 1..21: mol_type = other RNA
cacctgagggagtggagaaag

SEQ ID NO: 17691 - RNA, 21 nt, synthetic construct
  source 1..21: mol_type = other RNA
caccttatatgtcttaaccat

SEQ ID NO: 17692 - RNA, 21 nt, synthetic construct
  source 1..21: mol_type = other RNA
cacgaatgtaaccttcttcca

SEQ ID NO: 17693 - RNA, 21 nt, synthetic construct
  source 1..21: mol_type = other RNA
cacggcttaatgattaactat

SEQ ID NO: 17694 - RNA, 21 nt, synthetic construct
  source 1..21: mol_type = other RNA
cacgttgcttgaaattgaaaa

SEQ ID NO: 17695 - RNA, 21 nt, synthetic construct
  source 1..21: mol_type = other RNA
cactccctcaggtggtgttac

SEQ ID NO: 17696 - RNA, 21 nt, synthetic construct
  source 1..21: mol_type = other RNA
cactcccttttctccactgtg

SEQ ID NO: 17697 - RNA, 21 nt, synthetic construct
  source 1..21: mol_type = other RNA
cactgtgttctgtgtctctgt

SEQ ID NO: 17698 - RNA, 21 nt, synthetic construct
  source 1..21: mol_type = other RNA
cactgtttccaaaagaactaa

SEQ ID NO: 17699 - RNA, 21 nt, synthetic construct
  source 1..21: mol_type = other RNA
cacttactatatatgggattt

SEQ ID NO: 17700 - RNA, 21 nt, synthetic construct
  source 1..21: mol_type = other RNA
cactttctctctgaagccttt

SEQ ID NO: 17701 - RNA, 21 nt, synthetic construct
  source 1..21: mol_type = other RNA
cagaaaaacttatgatgggca

SEQ ID NO: 17702 - RNA, 21 nt, synthetic construct
  source 1..21: mol_type = other RNA
cagaaaaggtaaggttggtag

SEQ ID NO: 17703 - RNA, 21 nt, synthetic construct
  source 1..21: mol_type = other RNA
cagaacacagtggagaaaagg

SEQ ID NO: 17704 - RNA, 21 nt, synthetic construct
  source 1..21: mol_type = other RNA
cagaagaaaacagttccacgt

SEQ ID NO: 17705 - RNA, 21 nt, synthetic construct
  source 1..21: mol_type = other RNA
cagaccagcatgggcaataca

SEQ ID NO: 17706 - RNA, 21 nt, synthetic construct
  source 1..21: mol_type = other RNA
cagacctagacttcttaactc

SEQ ID NO: 17707 - RNA, 21 nt, synthetic construct
  source 1..21: mol_type = other RNA
cagagacacagaacacagtgg

SEQ ID NO: 17708 - RNA, 21 nt, synthetic construct
  source 1..21: mol_type = other RNA
cagagagaaagtgttttttgg

SEQ ID NO: 17709 - RNA, 21 nt, synthetic construct
  source 1..21: mol_type = other RNA
cagaggaacacagcattgaga

SEQ ID NO: 17710 - RNA, 21 nt, synthetic construct
  source 1..21: mol_type = other RNA
cagagtaccagaggaacacag

SEQ ID NO: 17711 - RNA, 21 nt, synthetic construct
  source 1..21: mol_type = other RNA
cagcaaagttaaatacaattt

SEQ ID NO: 17712 - RNA, 21 nt, synthetic construct
  source 1..21: mol_type = other RNA
cagcatgggcaatacattaag

SEQ ID NO: 17713 - RNA, 21 nt, synthetic construct
  source 1..21: mol_type = other RNA
cagcattgagagccgtaacac

SEQ ID NO: 17714 - RNA, 21 nt, synthetic construct
  source 1..21: mol_type = other RNA
cagcttgcccatcataagttt

SEQ ID NO: 17715 - RNA, 21 nt, synthetic construct
  source 1..21: mol_type = other RNA
caggtagtcaccatagcattg

SEQ ID NO: 17716 - RNA, 21 nt, synthetic construct
  source 1..21: mol_type = other RNA
caggtggtgttacggctctca

SEQ ID NO: 17717 - RNA, 21 nt, synthetic construct
  source 1..21: mol_type = other RNA
cagtatttccagaccagcatg

SEQ ID NO: 17718 - RNA, 21 nt, synthetic construct
  source 1..21: mol_type = other RNA
cagtgatccattccaaaaaac

SEQ ID NO: 17719 - RNA, 21 nt, synthetic construct
  source 1..21: mol_type = other RNA
cagtggagaaaagggagtgaa

SEQ ID NO: 17720 - RNA, 21 nt, synthetic construct
  source 1..21: mol_type = other RNA
cagttccacgttgcttgaaat

SEQ ID NO: 17721 - RNA, 21 nt, synthetic construct
  source 1..21: mol_type = other RNA
cagtttgagaaatgcatactt

SEQ ID NO: 17722 - RNA, 21 nt, synthetic construct
  source 1..21: mol_type = other RNA
cataagtttttctgaagtttg

SEQ ID NO: 17723 - RNA, 21 nt, synthetic construct
  source 1..21: mol_type = other RNA
catagcattgaatgtgtagtt

SEQ ID NO: 17724 - RNA, 21 nt, synthetic construct
  source 1..21: mol_type = other RNA
catagttaatcattaagccgt

SEQ ID NO: 17725 - RNA, 21 nt, synthetic construct
  source 1..21: mol_type = other RNA
catataaggtgatgcaaaaaa

SEQ ID NO: 17726 - RNA, 21 nt, synthetic construct
  source 1..21: mol_type = other RNA
catatatagtaagtgtcatta

SEQ ID NO: 17727 - RNA, 21 nt, synthetic construct
  source 1..21: mol_type = other RNA
catatccattgttccttcaac

SEQ ID NO: 17728 - RNA, 21 nt, synthetic construct
  source 1..21: mol_type = other RNA
catattaacaattatagtgac

SEQ ID NO: 17729 - RNA, 21 nt, synthetic construct
  source 1..21: mol_type = other RNA
catcaccttatatgtcttaac

SEQ ID NO: 17730 - RNA, 21 nt, synthetic construct
  source 1..21: mol_type = other RNA
catcataagtttttctgaagt

SEQ ID NO: 17731 - RNA, 21 nt, synthetic construct
  source 1..21: mol_type = other RNA
catccttgtatattgtcacaa

SEQ ID NO: 17732 - RNA, 21 nt, synthetic construct
  source 1..21: mol_type = other RNA
catctaggaccaaactagaat

SEQ ID NO: 17733 - RNA, 21 nt, synthetic construct
  source 1..21: mol_type = other RNA
catgctggtctggaaatactg

SEQ ID NO: 17734 - RNA, 21 nt, synthetic construct
  source 1..21: mol_type = other RNA
catgggcaatacattaagaca

SEQ ID NO: 17735 - RNA, 21 nt, synthetic construct
  source 1..21: mol_type = other RNA
catggtaaagagcctagaaca

SEQ ID NO: 17736 - RNA, 21 nt, synthetic construct
  source 1..21: mol_type = other RNA
catgtgctcgttgaaggaaca

SEQ ID NO: 17737 - RNA, 21 nt, synthetic construct
  source 1..21: mol_type = other RNA
cattaaagacatttcactccc

SEQ ID NO: 17738 - RNA, 21 nt, synthetic construct
  source 1..21: mol_type = other RNA
cattaagacatcatctttaaa

SEQ ID NO: 17739 - RNA, 21 nt, synthetic construct
  source 1..21: mol_type = other RNA
cattaagccgtgttaacttgc

SEQ ID NO: 17740 - RNA, 21 nt, synthetic construct
  source 1..21: mol_type = other RNA
cattacttttttcccctcaac

SEQ ID NO: 17741 - RNA, 21 nt, synthetic construct
  source 1..21: mol_type = other RNA
cattcaatgctatggtgacta

SEQ ID NO: 17742 - RNA, 21 nt, synthetic construct
  source 1..21: mol_type = other RNA
cattccaaaaaacactttctc

SEQ ID NO: 17743 - RNA, 21 nt, synthetic construct
  source 1..21: mol_type = other RNA
cattcgtgcaagttaacacgg

SEQ ID NO: 17744 - RNA, 21 nt, synthetic construct
  source 1..21: mol_type = other RNA
cattgaaggtatttaagattc

SEQ ID NO: 17745 - RNA, 21 nt, synthetic construct
  source 1..21: mol_type = other RNA
cattgaatgtgtagtttataa

SEQ ID NO: 17746 - RNA, 21 nt, synthetic construct
  source 1..21: mol_type = other RNA
cattgagagccgtaacaccac

SEQ ID NO: 17747 - RNA, 21 nt, synthetic construct
  source 1..21: mol_type = other RNA
cattgagttagatcaatgcta

SEQ ID NO: 17748 - RNA, 21 nt, synthetic construct
  source 1..21: mol_type = other RNA
cattgatctaactcaatgtgg

SEQ ID NO: 17749 - RNA, 21 nt, synthetic construct
  source 1..21: mol_type = other RNA
cattgatttatacagagtacc

SEQ ID NO: 17750 - RNA, 21 nt, synthetic construct
  source 1..21: mol_type = other RNA
cattgttccttcaacgagcac

SEQ ID NO: 17751 - RNA, 21 nt, synthetic construct
  source 1..21: mol_type = other RNA
catttaacaaaaagaggagat

SEQ ID NO: 17752 - RNA, 21 nt, synthetic construct
  source 1..21: mol_type = other RNA
catttagcattgatctaactc

SEQ ID NO: 17753 - RNA, 21 nt, synthetic construct
  source 1..21: mol_type = other RNA
catttcactcccttttctcca

SEQ ID NO: 17754 - RNA, 21 nt, synthetic construct
  source 1..21: mol_type = other RNA
catttctcaaactgtacttta

SEQ ID NO: 17755 - RNA, 21 nt, synthetic construct
  source 1..21: mol_type = other RNA
catttctttgatttcatttag

SEQ ID NO: 17756 - RNA, 21 nt, synthetic construct
  source 1..21: mol_type = other RNA
cattttttgtcactataattg

SEQ ID NO: 17757 - RNA, 21 nt, synthetic construct
  source 1..21: mol_type = other RNA
ccaaaaaacactttctctctg

SEQ ID NO: 17758 - RNA, 21 nt, synthetic construct
  source 1..21: mol_type = other RNA
ccaaaagaactaaagtacagt

SEQ ID NO: 17759 - RNA, 21 nt, synthetic construct
  source 1..21: mol_type = other RNA
ccaaactagaattgaatctta

SEQ ID NO: 17760 - RNA, 21 nt, synthetic construct
  source 1..21: mol_type = other RNA
ccaaccttaccttttctgggc

SEQ ID NO: 17761 - RNA, 21 nt, synthetic construct
  source 1..21: mol_type = other RNA
ccaaggtaaaagaattgcttg

SEQ ID NO: 17762 - RNA, 21 nt, synthetic construct
  source 1..21: mol_type = other RNA
ccaatatttgcccagaaaagg

SEQ ID NO: 17763 - RNA, 21 nt, synthetic construct
  source 1..21: mol_type = other RNA
ccacatatccattgttccttc

SEQ ID NO: 17764 - RNA, 21 nt, synthetic construct
  source 1..21: mol_type = other RNA
ccacattgagttagatcaatg

SEQ ID NO: 17765 - RNA, 21 nt, synthetic construct
  source 1..21: mol_type = other RNA
ccacctgagggagtggagaaa

SEQ ID NO: 17766 - RNA, 21 nt, synthetic construct
  source 1..21: mol_type = other RNA
ccacgttgcttgaaattgaaa

SEQ ID NO: 17767 - RNA, 21 nt, synthetic construct
  source 1..21: mol_type = other RNA
ccactccctcaggtggtgtta

SEQ ID NO: 17768 - RNA, 21 nt, synthetic construct
  source 1..21: mol_type = other RNA
ccactgtgttctgtgtctctg

SEQ ID NO: 17769 - RNA, 21 nt, synthetic construct
  source 1..21: mol_type = other RNA
ccagaaaaggtaaggttggta

SEQ ID NO: 17770 - RNA, 21 nt, synthetic construct
  source 1..21: mol_type = other RNA
ccagaagaaaacagttccacg

SEQ ID NO: 17771 - RNA, 21 nt, synthetic construct
  source 1..21: mol_type = other RNA
ccagaccagcatgggcaatac

SEQ ID NO: 17772 - RNA, 21 nt, synthetic construct
  source 1..21: mol_type = other RNA
ccagaggaacacagcattgag

SEQ ID NO: 17773 - RNA, 21 nt, synthetic construct
  source 1..21: mol_type = other RNA
ccagcatgggcaatacattaa

SEQ ID NO: 17774 - RNA, 21 nt, synthetic construct
  source 1..21: mol_type = other RNA
ccagtatttccagaccagcat

SEQ ID NO: 17775 - RNA, 21 nt, synthetic construct
  source 1..21: mol_type = other RNA
ccatagcattgaatgtgtagt

SEQ ID NO: 17776 - RNA, 21 nt, synthetic construct
  source 1..21: mol_type = other RNA
ccatatatagtaagtgtcatt

SEQ ID NO: 17777 - RNA, 21 nt, synthetic construct
  source 1..21: mol_type = other RNA
ccatcataagtttttctgaag

SEQ ID NO: 17778 - RNA, 21 nt, synthetic construct
  source 1..21: mol_type = other RNA
ccatccttgtatattgtcaca

SEQ ID NO: 17779 - RNA, 21 nt, synthetic construct
  source 1..21: mol_type = other RNA
ccatgctggtctggaaatact

SEQ ID NO: 17780 - RNA, 21 nt, synthetic construct
  source 1..21: mol_type = other RNA
ccatgtgctcgttgaaggaac

SEQ ID NO: 17781 - RNA, 21 nt, synthetic construct
  source 1..21: mol_type = other RNA
ccattccaaaaaacactttct

SEQ ID NO: 17782 - RNA, 21 nt, synthetic construct
  source 1..21: mol_type = other RNA
ccattgttccttcaacgagca

SEQ ID NO: 17783 - RNA, 21 nt, synthetic construct
  source 1..21: mol_type = other RNA
cccaacaaaaaagtttatttt

SEQ ID NO: 17784 - RNA, 21 nt, synthetic construct
  source 1..21: mol_type = other RNA
cccagaaaaggtaaggttggt

SEQ ID NO: 17785 - RNA, 21 nt, synthetic construct
  source 1..21: mol_type = other RNA
cccagtatttccagaccagca

SEQ ID NO: 17786 - RNA, 21 nt, synthetic construct
  source 1..21: mol_type = other RNA
cccatatatagtaagtgtcat

SEQ ID NO: 17787 - RNA, 21 nt, synthetic construct
  source 1..21: mol_type = other RNA
cccatcataagtttttctgaa

SEQ ID NO: 17788 - RNA, 21 nt, synthetic construct
  source 1..21: mol_type = other RNA
cccatgctggtctggaaatac

SEQ ID NO: 17789 - RNA, 21 nt, synthetic construct
  source 1..21: mol_type = other RNA
cccctcaactttaataataaa

SEQ ID NO: 17790 - RNA, 21 nt, synthetic construct
  source 1..21: mol_type = other RNA
ccctcaactttaataataaat

SEQ ID NO: 17791 - RNA, 21 nt, synthetic construct
  source 1..21: mol_type = other RNA
ccctcaggtggtgttacggct

SEQ ID NO: 17792 - RNA, 21 nt, synthetic construct
  source 1..21: mol_type = other RNA
cccttttctccactgtgttct

SEQ ID NO: 17793 - RNA, 21 nt, synthetic construct
  source 1..21: mol_type = other RNA
ccgtaacaccacctgagggag

SEQ ID NO: 17794 - RNA, 21 nt, synthetic construct
  source 1..21: mol_type = other RNA
ccgtgttaacttgcacgaatg

SEQ ID NO: 17795 - RNA, 21 nt, synthetic construct
  source 1..21: mol_type = other RNA
cctaccaaccttaccttttct

SEQ ID NO: 17796 - RNA, 21 nt, synthetic construct
  source 1..21: mol_type = other RNA
cctagaacacagagacacaga

SEQ ID NO: 17797 - RNA, 21 nt, synthetic construct
  source 1..21: mol_type = other RNA
cctagacttcttaactctata

SEQ ID NO: 17798 - RNA, 21 nt, synthetic construct
  source 1..21: mol_type = other RNA
cctagatgaccacatatccat

SEQ ID NO: 17799 - RNA, 21 nt, synthetic construct
  source 1..21: mol_type = other RNA
cctattaagttagttgctcat

SEQ ID NO: 17800 - RNA, 21 nt, synthetic construct
  source 1..21: mol_type = other RNA
cctcaggtggtgttacggctc

SEQ ID NO: 17801 - RNA, 21 nt, synthetic construct
  source 1..21: mol_type = other RNA
cctcattttttgtcactataa

SEQ ID NO: 17802 - RNA, 21 nt, synthetic construct
  source 1..21: mol_type = other RNA
cctctggtactctgtataaat

SEQ ID NO: 17803 - RNA, 21 nt, synthetic construct
  source 1..21: mol_type = other RNA
cctctttttgttaaatgtata

SEQ ID NO: 17804 - RNA, 21 nt, synthetic construct
  source 1..21: mol_type = other RNA
cctgagggagtggagaaaggc

SEQ ID NO: 17805 - RNA, 21 nt, synthetic construct
  source 1..21: mol_type = other RNA
cctgtttttaaaagctaattt

SEQ ID NO: 17806 - RNA, 21 nt, synthetic construct
  source 1..21: mol_type = other RNA
ccttaccttttctgggcaaat

SEQ ID NO: 17807 - RNA, 21 nt, synthetic construct
  source 1..21: mol_type = other RNA
ccttatatgtcttaaccatcc

SEQ ID NO: 17808 - RNA, 21 nt, synthetic construct
  source 1..21: mol_type = other RNA
ccttcaacgagcacatggtaa

SEQ ID NO: 17809 - RNA, 21 nt, synthetic construct
  source 1..21: mol_type = other RNA
ccttcaatgtcacaagcagct

SEQ ID NO: 17810 - RNA, 21 nt, synthetic construct
  source 1..21: mol_type = other RNA
ccttcttccacattgagttag

SEQ ID NO: 17811 - RNA, 21 nt, synthetic construct
  source 1..21: mol_type = other RNA
ccttgtatattgtcacaaaat

SEQ ID NO: 17812 - RNA, 21 nt, synthetic construct
  source 1..21: mol_type = other RNA
cctttctccactccctcaggt

SEQ ID NO: 17813 - RNA, 21 nt, synthetic construct
  source 1..21: mol_type = other RNA
ccttttctccactgtgttctg

SEQ ID NO: 17814 - RNA, 21 nt, synthetic construct
  source 1..21: mol_type = other RNA
ccttttctgggcaaatattgg

SEQ ID NO: 17815 - RNA, 21 nt, synthetic construct
  source 1..21: mol_type = other RNA
cgaatgtaaccttcttccaca

SEQ ID NO: 17816 - RNA, 21 nt, synthetic construct
  source 1..21: mol_type = other RNA
cgagcacatggtaaagagcct

SEQ ID NO: 17817 - RNA, 21 nt, synthetic construct
  source 1..21: mol_type = other RNA
cggctctcaatgctgtgttcc

SEQ ID NO: 17818 - RNA, 21 nt, synthetic construct
  source 1..21: mol_type = other RNA
cggcttaatgattaactatgt

SEQ ID NO: 17819 - RNA, 21 nt, synthetic construct
  source 1..21: mol_type = other RNA
cgtaacaccacctgagggagt

SEQ ID NO: 17820 - RNA, 21 nt, synthetic construct
  source 1..21: mol_type = other RNA
cgtgcaagttaacacggctta

SEQ ID NO: 17821 - RNA, 21 nt, synthetic construct
  source 1..21: mol_type = other RNA
cgtggaactgttttcttctgg

SEQ ID NO: 17822 - RNA, 21 nt, synthetic construct
  source 1..21: mol_type = other RNA
cgtgttaacttgcacgaatgt

SEQ ID NO: 17823 - RNA, 21 nt, synthetic construct
  source 1..21: mol_type = other RNA
cgttgaaggaacaatggatat

SEQ ID NO: 17824 - RNA, 21 nt, synthetic construct
  source 1..21: mol_type = other RNA
cgttgcttgaaattgaaaatc

SEQ ID NO: 17825 - RNA, 21 nt, synthetic construct
  source 1..21: mol_type = other RNA
ctaaagtacagtttgagaaat

SEQ ID NO: 17826 - RNA, 21 nt, synthetic construct
  source 1..21: mol_type = other RNA
ctaaatgaaatcaaagaaatg

SEQ ID NO: 17827 - RNA, 21 nt, synthetic construct
  source 1..21: mol_type = other RNA
ctaacaaacttcagaaaaact

SEQ ID NO: 17828 - RNA, 21 nt, synthetic construct
  source 1..21: mol_type = other RNA
ctaactcaatgtggaagaagg

SEQ ID NO: 17829 - RNA, 21 nt, synthetic construct
  source 1..21: mol_type = other RNA
ctaacttaataggtaatttga

SEQ ID NO: 17830 - RNA, 21 nt, synthetic construct
  source 1..21: mol_type = other RNA
ctaagctaacaaacttcagaa

SEQ ID NO: 17831 - RNA, 21 nt, synthetic construct
  source 1..21: mol_type = other RNA
ctacacattcaatgctatggt

SEQ ID NO: 17832 - RNA, 21 nt, synthetic construct
  source 1..21: mol_type = other RNA
ctaccaaccttaccttttctg

SEQ ID NO: 17833 - RNA, 21 nt, synthetic construct
  source 1..21: mol_type = other RNA
ctacctgtttttaaaagctaa

SEQ ID NO: 17834 - RNA, 21 nt, synthetic construct
  source 1..21: mol_type = other RNA
ctagaacacagagacacagaa

SEQ ID NO: 17835 - RNA, 21 nt, synthetic construct
  source 1..21: mol_type = other RNA
ctagaattgaatcttaaatac

SEQ ID NO: 17836 - RNA, 21 nt, synthetic construct
  source 1..21: mol_type = other RNA
ctagacttcttaactctatat

SEQ ID NO: 17837 - RNA, 21 nt, synthetic construct
  source 1..21: mol_type = other RNA
ctagatgaccacatatccatt

SEQ ID NO: 17838 - RNA, 21 nt, synthetic construct
  source 1..21: mol_type = other RNA
ctaggaccaaactagaattga

SEQ ID NO: 17839 - RNA, 21 nt, synthetic construct
  source 1..21: mol_type = other RNA
ctaggctctttaccatgtgct

SEQ ID NO: 17840 - RNA, 21 nt, synthetic construct
  source 1..21: mol_type = other RNA
ctaggtctgcttccagaagaa

SEQ ID NO: 17841 - RNA, 21 nt, synthetic construct
  source 1..21: mol_type = other RNA
ctagtttggtcctagatgacc

SEQ ID NO: 17842 - RNA, 21 nt, synthetic construct
  source 1..21: mol_type = other RNA
ctatatataccaatatttgcc

SEQ ID NO: 17843 - RNA, 21 nt, synthetic construct
  source 1..21: mol_type = other RNA
ctatatatgggattttgtgac

SEQ ID NO: 17844 - RNA, 21 nt, synthetic construct
  source 1..21: mol_type = other RNA
ctatggtgactacctgttttt

SEQ ID NO: 17845 - RNA, 21 nt, synthetic construct
  source 1..21: mol_type = other RNA
ctatgttcacctaccaacctt

SEQ ID NO: 17846 - RNA, 21 nt, synthetic construct
  source 1..21: mol_type = other RNA
ctattaagttagttgctcatt

SEQ ID NO: 17847 - RNA, 21 nt, synthetic construct
  source 1..21: mol_type = other RNA
ctcaaactgtactttagttct

SEQ ID NO: 17848 - RNA, 21 nt, synthetic construct
  source 1..21: mol_type = other RNA
ctcaagcaattcttttacctt

SEQ ID NO: 17849 - RNA, 21 nt, synthetic construct
  source 1..21: mol_type = other RNA
ctcaatgctgtgttcctctgg

SEQ ID NO: 17850 - RNA, 21 nt, synthetic construct
  source 1..21: mol_type = other RNA
ctcaatgtggaagaaggttac

SEQ ID NO: 17851 - RNA, 21 nt, synthetic construct
  source 1..21: mol_type = other RNA
ctcaggtggtgttacggctct

SEQ ID NO: 17852 - RNA, 21 nt, synthetic construct
  source 1..21: mol_type = other RNA
ctcatttctttgatttcattt

SEQ ID NO: 17853 - RNA, 21 nt, synthetic construct
  source 1..21: mol_type = other RNA
ctcattttttgtcactataat

SEQ ID NO: 17854 - RNA, 21 nt, synthetic construct
  source 1..21: mol_type = other RNA
ctccactccctcaggtggtgt

SEQ ID NO: 17855 - RNA, 21 nt, synthetic construct
  source 1..21: mol_type = other RNA
ctccactgtgttctgtgtctc

SEQ ID NO: 17856 - RNA, 21 nt, synthetic construct
  source 1..21: mol_type = other RNA
ctccctcaggtggtgttacgg

SEQ ID NO: 17857 - RNA, 21 nt, synthetic construct
  source 1..21: mol_type = other RNA
ctcccttttctccactgtgtt

SEQ ID NO: 17858 - RNA, 21 nt, synthetic construct
  source 1..21: mol_type = other RNA
ctcctcattttttgtcactat

SEQ ID NO: 17859 - RNA, 21 nt, synthetic construct
  source 1..21: mol_type = other RNA
ctcctctttttgttaaatgta

SEQ ID NO: 17860 - RNA, 21 nt, synthetic construct
  source 1..21: mol_type = other RNA
ctcgttgaaggaacaatggat

SEQ ID NO: 17861 - RNA, 21 nt, synthetic construct
  source 1..21: mol_type = other RNA
ctctatatataccaatatttg

SEQ ID NO: 17862 - RNA, 21 nt, synthetic construct
  source 1..21: mol_type = other RNA
ctctcaatgctgtgttcctct

SEQ ID NO: 17863 - RNA, 21 nt, synthetic construct
  source 1..21: mol_type = other RNA
ctctctgaagcctttctccac

SEQ ID NO: 17864 - RNA, 21 nt, synthetic construct
  source 1..21: mol_type = other RNA
ctctgaagcctttctccactc

SEQ ID NO: 17865 - RNA, 21 nt, synthetic construct
  source 1..21: mol_type = other RNA
ctctggtactctgtataaatc

SEQ ID NO: 17866 - RNA, 21 nt, synthetic construct
  source 1..21: mol_type = other RNA
ctctgtataaatcaatgtata

SEQ ID NO: 17867 - RNA, 21 nt, synthetic construct
  source 1..21: mol_type = other RNA
ctctgtgttctaggctcttta

SEQ ID NO: 17868 - RNA, 21 nt, synthetic construct
  source 1..21: mol_type = other RNA
ctctttaccatgtgctcgttg

SEQ ID NO: 17869 - RNA, 21 nt, synthetic construct
  source 1..21: mol_type = other RNA
ctgaagcctttctccactccc

SEQ ID NO: 17870 - RNA, 21 nt, synthetic construct
  source 1..21: mol_type = other RNA
ctgaagtttgttagcttagta

SEQ ID NO: 17871 - RNA, 21 nt, synthetic construct
  source 1..21: mol_type = other RNA
ctgagggagtggagaaaggct

SEQ ID NO: 17872 - RNA, 21 nt, synthetic construct
  source 1..21: mol_type = other RNA
ctgcttccagaagaaaacagt

SEQ ID NO: 17873 - RNA, 21 nt, synthetic construct
  source 1..21: mol_type = other RNA
ctgcttgtgacattgaaggta

SEQ ID NO: 17874 - RNA, 21 nt, synthetic construct
  source 1..21: mol_type = other RNA
ctggaaatactgggctcaagc

SEQ ID NO: 17875 - RNA, 21 nt, synthetic construct
  source 1..21: mol_type = other RNA
ctggaagcagacctagacttc

SEQ ID NO: 17876 - RNA, 21 nt, synthetic construct
  source 1..21: mol_type = other RNA
ctgggcaaatattggtatata

SEQ ID NO: 17877 - RNA, 21 nt, synthetic construct
  source 1..21: mol_type = other RNA
ctgggctcaagcaattctttt

SEQ ID NO: 17878 - RNA, 21 nt, synthetic construct
  source 1..21: mol_type = other RNA
ctggtactctgtataaatcaa

SEQ ID NO: 17879 - RNA, 21 nt, synthetic construct
  source 1..21: mol_type = other RNA
ctggtctggaaatactgggct

SEQ ID NO: 17880 - RNA, 21 nt, synthetic construct
  source 1..21: mol_type = other RNA
ctgtactttagttcttttgga

SEQ ID NO: 17881 - RNA, 21 nt, synthetic construct
  source 1..21: mol_type = other RNA
ctgtattataaactacacatt

SEQ ID NO: 17882 - RNA, 21 nt, synthetic construct
  source 1..21: mol_type = other RNA
ctgtgtctctgtgttctaggc

SEQ ID NO: 17883 - RNA, 21 nt, synthetic construct
  source 1..21: mol_type = other RNA
ctgtgttcctctggtactctg

SEQ ID NO: 17884 - RNA, 21 nt, synthetic construct
  source 1..21: mol_type = other RNA
ctgtgttctaggctctttacc

SEQ ID NO: 17885 - RNA, 21 nt, synthetic construct
  source 1..21: mol_type = other RNA
ctgtgttctgtgtctctgtgt

SEQ ID NO: 17886 - RNA, 21 nt, synthetic construct
  source 1..21: mol_type = other RNA
ctgtttccaaaagaactaaag

SEQ ID NO: 17887 - RNA, 21 nt, synthetic construct
  source 1..21: mol_type = other RNA
ctgttttcttctggaagcaga

SEQ ID NO: 17888 - RNA, 21 nt, synthetic construct
  source 1..21: mol_type = other RNA
cttaaataccttcaatgtcac

SEQ ID NO: 17889 - RNA, 21 nt, synthetic construct
  source 1..21: mol_type = other RNA
cttaaccatccttgtatattg

SEQ ID NO: 17890 - RNA, 21 nt, synthetic construct
  source 1..21: mol_type = other RNA
cttaactctatatataccaat

SEQ ID NO: 17891 - RNA, 21 nt, synthetic construct
  source 1..21: mol_type = other RNA
cttaatgattaactatgttca

SEQ ID NO: 17892 - RNA, 21 nt, synthetic construct
  source 1..21: mol_type = other RNA
cttaatgtattgcccatgctg

SEQ ID NO: 17893 - RNA, 21 nt, synthetic construct
  source 1..21: mol_type = other RNA
cttaattcattacttttttcc

SEQ ID NO: 17894 - RNA, 21 nt, synthetic construct
  source 1..21: mol_type = other RNA
cttaccttttctgggcaaata

SEQ ID NO: 17895 - RNA, 21 nt, synthetic construct
  source 1..21: mol_type = other RNA
cttactatatatgggattttg

SEQ ID NO: 17896 - RNA, 21 nt, synthetic construct
  source 1..21: mol_type = other RNA
cttatatgtcttaaccatcct

SEQ ID NO: 17897 - RNA, 21 nt, synthetic construct
  source 1..21: mol_type = other RNA
cttatgatgggcaagctgctt

SEQ ID NO: 17898 - RNA, 21 nt, synthetic construct
  source 1..21: mol_type = other RNA
cttcaacgagcacatggtaaa

SEQ ID NO: 17899 - RNA, 21 nt, synthetic construct
  source 1..21: mol_type = other RNA
cttcaatgtcacaagcagctt

SEQ ID NO: 17900 - RNA, 21 nt, synthetic construct
  source 1..21: mol_type = other RNA
cttcagaaaaacttatgatgg

SEQ ID NO: 17901 - RNA, 21 nt, synthetic construct
  source 1..21: mol_type = other RNA
cttcagagagaaagtgttttt

SEQ ID NO: 17902 - RNA, 21 nt, synthetic construct
  source 1..21: mol_type = other RNA
cttccacattgagttagatca

SEQ ID NO: 17903 - RNA, 21 nt, synthetic construct
  source 1..21: mol_type = other RNA
cttccagaagaaaacagttcc

SEQ ID NO: 17904 - RNA, 21 nt, synthetic construct
  source 1..21: mol_type = other RNA
cttctggaagcagacctagac

SEQ ID NO: 17905 - RNA, 21 nt, synthetic construct
  source 1..21: mol_type = other RNA
cttcttaactctatatatacc

SEQ ID NO: 17906 - RNA, 21 nt, synthetic construct
  source 1..21: mol_type = other RNA
cttcttccacattgagttaga

SEQ ID NO: 17907 - RNA, 21 nt, synthetic construct
  source 1..21: mol_type = other RNA
cttgagcccagtatttccaga

SEQ ID NO: 17908 - RNA, 21 nt, synthetic construct
  source 1..21: mol_type = other RNA
cttgattttcaatttcaagca

SEQ ID NO: 17909 - RNA, 21 nt, synthetic construct
  source 1..21: mol_type = other RNA
cttgcacgaatgtaaccttct

SEQ ID NO: 17910 - RNA, 21 nt, synthetic construct
  source 1..21: mol_type = other RNA
cttgcccatcataagtttttc

SEQ ID NO: 17911 - RNA, 21 nt, synthetic construct
  source 1..21: mol_type = other RNA
cttgtaaatctcttaaaatca

SEQ ID NO: 17912 - RNA, 21 nt, synthetic construct
  source 1..21: mol_type = other RNA
cttgtatattgtcacaaaatc

SEQ ID NO: 17913 - RNA, 21 nt, synthetic construct
  source 1..21: mol_type = other RNA
cttgtgacattgaaggtattt

SEQ ID NO: 17914 - RNA, 21 nt, synthetic construct
  source 1..21: mol_type = other RNA
ctttaatgacacttactatat

SEQ ID NO: 17915 - RNA, 21 nt, synthetic construct
  source 1..21: mol_type = other RNA
ctttaccatgtgctcgttgaa

SEQ ID NO: 17916 - RNA, 21 nt, synthetic construct
  source 1..21: mol_type = other RNA
ctttagttcttttggaaacag

SEQ ID NO: 17917 - RNA, 21 nt, synthetic construct
  source 1..21: mol_type = other RNA
ctttctccactccctcaggtg

SEQ ID NO: 17918 - RNA, 21 nt, synthetic construct
  source 1..21: mol_type = other RNA
ctttctctctgaagcctttct

SEQ ID NO: 17919 - RNA, 21 nt, synthetic construct
  source 1..21: mol_type = other RNA
ctttgatttcatttagcattg

SEQ ID NO: 17920 - RNA, 21 nt, synthetic construct
  source 1..21: mol_type = other RNA
ctttgctgtattataaactac

SEQ ID NO: 17921 - RNA, 21 nt, synthetic construct
  source 1..21: mol_type = other RNA
cttttaaaaacaggtagtcac

SEQ ID NO: 17922 - RNA, 21 nt, synthetic construct
  source 1..21: mol_type = other RNA
cttttctccactgtgttctgt

SEQ ID NO: 17923 - RNA, 21 nt, synthetic construct
  source 1..21: mol_type = other RNA
cttttctgggcaaatattggt

SEQ ID NO: 17924 - RNA, 21 nt, synthetic construct
  source 1..21: mol_type = other RNA
cttttggaaacagtgatccat

SEQ ID NO: 17925 - RNA, 21 nt, synthetic construct
  source 1..21: mol_type = other RNA
cttttttcccctcaactttaa

SEQ ID NO: 17926 - RNA, 21 nt, synthetic construct
  source 1..21: mol_type = other RNA
cttttttgttgggtaaattta

SEQ ID NO: 17927 - RNA, 21 nt, synthetic construct
  source 1..21: mol_type = other RNA
gaaaaacttatgatgggcaag

SEQ ID NO: 17928 - RNA, 21 nt, synthetic construct
  source 1..21: mol_type = other RNA
gaaaacagttccacgttgctt

SEQ ID NO: 17929 - RNA, 21 nt, synthetic construct
  source 1..21: mol_type = other RNA
gaaaagggagtgaaatgtctt

SEQ ID NO: 17930 - RNA, 21 nt, synthetic construct
  source 1..21: mol_type = other RNA
gaaaaggtaaggttggtaggt

SEQ ID NO: 17931 - RNA, 21 nt, synthetic construct
  source 1..21: mol_type = other RNA
gaaacagtgatccattccaaa

SEQ ID NO: 17932 - RNA, 21 nt, synthetic construct
  source 1..21: mol_type = other RNA
gaaaggcttcagagagaaagt

SEQ ID NO: 17933 - RNA, 21 nt, synthetic construct
  source 1..21: mol_type = other RNA
gaaagtgttttttggaatgga

SEQ ID NO: 17934 - RNA, 21 nt, synthetic construct
  source 1..21: mol_type = other RNA
gaaatactgggctcaagcaat

SEQ ID NO: 17935 - RNA, 21 nt, synthetic construct
  source 1..21: mol_type = other RNA
gaaatcaaagaaatgagcaac

SEQ ID NO: 17936 - RNA, 21 nt, synthetic construct
  source 1..21: mol_type = other RNA
gaaatgagcaactaacttaat

SEQ ID NO: 17937 - RNA, 21 nt, synthetic construct
  source 1..21: mol_type = other RNA
gaaatgcatacttaattcatt

SEQ ID NO: 17938 - RNA, 21 nt, synthetic construct
  source 1..21: mol_type = other RNA
gaaatgtctttaatgacactt

SEQ ID NO: 17939 - RNA, 21 nt, synthetic construct
  source 1..21: mol_type = other RNA
gaaattgtatttaactttgct

SEQ ID NO: 17940 - RNA, 21 nt, synthetic construct
  source 1..21: mol_type = other RNA
gaacaatggatatgtggtcat

SEQ ID NO: 17941 - RNA, 21 nt, synthetic construct
  source 1..21: mol_type = other RNA
gaacacagagacacagaacac

SEQ ID NO: 17942 - RNA, 21 nt, synthetic construct
  source 1..21: mol_type = other RNA
gaacacagcattgagagccgt

SEQ ID NO: 17943 - RNA, 21 nt, synthetic construct
  source 1..21: mol_type = other RNA
gaacacagtggagaaaaggga

SEQ ID NO: 17944 - RNA, 21 nt, synthetic construct
  source 1..21: mol_type = other RNA
gaacatagttaatcattaagc

SEQ ID NO: 17945 - RNA, 21 nt, synthetic construct
  source 1..21: mol_type = other RNA
gaactaaagtacagtttgaga

SEQ ID NO: 17946 - RNA, 21 nt, synthetic construct
  source 1..21: mol_type = other RNA
gaactgttttcttctggaagc

SEQ ID NO: 17947 - RNA, 21 nt, synthetic construct
  source 1..21: mol_type = other RNA
gaagaaaacagttccacgttg

SEQ ID NO: 17948 - RNA, 21 nt, synthetic construct
  source 1..21: mol_type = other RNA
gaagaaggttacattcgtgca

SEQ ID NO: 17949 - RNA, 21 nt, synthetic construct
  source 1..21: mol_type = other RNA
gaagcagacctagacttctta

SEQ ID NO: 17950 - RNA, 21 nt, synthetic construct
  source 1..21: mol_type = other RNA
gaagcctttctccactccctc

SEQ ID NO: 17951 - RNA, 21 nt, synthetic construct
  source 1..21: mol_type = other RNA
gaaggaacaatggatatgtgg

SEQ ID NO: 17952 - RNA, 21 nt, synthetic construct
  source 1..21: mol_type = other RNA
gaaggtatttaagattcaatt

SEQ ID NO: 17953 - RNA, 21 nt, synthetic construct
  source 1..21: mol_type = other RNA
gaaggttacattcgtgcaagt

SEQ ID NO: 17954 - RNA, 21 nt, synthetic construct
  source 1..21: mol_type = other RNA
gaagtctaggtctgcttccag

SEQ ID NO: 17955 - RNA, 21 nt, synthetic construct
  source 1..21: mol_type = other RNA
gaagtttgttagcttagtaac

SEQ ID NO: 17956 - RNA, 21 nt, synthetic construct
  source 1..21: mol_type = other RNA
gaatcttaaataccttcaatg

SEQ ID NO: 17957 - RNA, 21 nt, synthetic construct
  source 1..21: mol_type = other RNA
gaatggatcactgtttccaaa

SEQ ID NO: 17958 - RNA, 21 nt, synthetic construct
  source 1..21: mol_type = other RNA
gaatgtaaccttcttccacat

SEQ ID NO: 17959 - RNA, 21 nt, synthetic construct
  source 1..21: mol_type = other RNA
gaatgtgtagtttataataca

SEQ ID NO: 17960 - RNA, 21 nt, synthetic construct
  source 1..21: mol_type = other RNA
gaattaagtatgcatttctca

SEQ ID NO: 17961 - RNA, 21 nt, synthetic construct
  source 1..21: mol_type = other RNA
gaattgaatcttaaatacctt

SEQ ID NO: 17962 - RNA, 21 nt, synthetic construct
  source 1..21: mol_type = other RNA
gaattgcttgagcccagtatt

SEQ ID NO: 17963 - RNA, 21 nt, synthetic construct
  source 1..21: mol_type = other RNA
gacaaaaaatgaggagcatat

SEQ ID NO: 17964 - RNA, 21 nt, synthetic construct
  source 1..21: mol_type = other RNA
gacaatatacaaggatggtta

SEQ ID NO: 17965 - RNA, 21 nt, synthetic construct
  source 1..21: mol_type = other RNA
gacacagaacacagtggagaa

SEQ ID NO: 17966 - RNA, 21 nt, synthetic construct
  source 1..21: mol_type = other RNA
gacacttactatatatgggat

SEQ ID NO: 17967 - RNA, 21 nt, synthetic construct
  source 1..21: mol_type = other RNA
gacatataaggtgatgcaaaa

SEQ ID NO: 17968 - RNA, 21 nt, synthetic construct
  source 1..21: mol_type = other RNA
gacattgaaggtatttaagat

SEQ ID NO: 17969 - RNA, 21 nt, synthetic construct
  source 1..21: mol_type = other RNA
gacatttcactcccttttctc

SEQ ID NO: 17970 - RNA, 21 nt, synthetic construct
  source 1..21: mol_type = other RNA
gaccaaactagaattgaatct

SEQ ID NO: 17971 - RNA, 21 nt, synthetic construct
  source 1..21: mol_type = other RNA
gaccacatatccattgttcct

SEQ ID NO: 17972 - RNA, 21 nt, synthetic construct
  source 1..21: mol_type = other RNA
gaccagcatgggcaatacatt

SEQ ID NO: 17973 - RNA, 21 nt, synthetic construct
  source 1..21: mol_type = other RNA
gacctagacttcttaactcta

SEQ ID NO: 17974 - RNA, 21 nt, synthetic construct
  source 1..21: mol_type = other RNA
gactacctgtttttaaaagct

SEQ ID NO: 17975 - RNA, 21 nt, synthetic construct
  source 1..21: mol_type = other RNA
gacttcttaactctatatata

SEQ ID NO: 17976 - RNA, 21 nt, synthetic construct
  source 1..21: mol_type = other RNA
gacttgtaaatctcttaaaat

SEQ ID NO: 17977 - RNA, 21 nt, synthetic construct
  source 1..21: mol_type = other RNA
gagaaaagggagtgaaatgtc

SEQ ID NO: 17978 - RNA, 21 nt, synthetic construct
  source 1..21: mol_type = other RNA
gagaaaggcttcagagagaaa

SEQ ID NO: 17979 - RNA, 21 nt, synthetic construct
  source 1..21: mol_type = other RNA
gagaaagtgttttttggaatg

SEQ ID NO: 17980 - RNA, 21 nt, synthetic construct
  source 1..21: mol_type = other RNA
gagaaatgcatacttaattca

SEQ ID NO: 17981 - RNA, 21 nt, synthetic construct
  source 1..21: mol_type = other RNA
gagacacagaacacagtggag

SEQ ID NO: 17982 - RNA, 21 nt, synthetic construct
  source 1..21: mol_type = other RNA
gagagaaagtgttttttggaa

SEQ ID NO: 17983 - RNA, 21 nt, synthetic construct
  source 1..21: mol_type = other RNA
gagagccgtaacaccacctga

SEQ ID NO: 17984 - RNA, 21 nt, synthetic construct
  source 1..21: mol_type = other RNA
gagatttacaagtcaaaaata

SEQ ID NO: 17985 - RNA, 21 nt, synthetic construct
  source 1..21: mol_type = other RNA
gagcaactaacttaataggta

SEQ ID NO: 17986 - RNA, 21 nt, synthetic construct
  source 1..21: mol_type = other RNA
gagcacatggtaaagagccta

SEQ ID NO: 17987 - RNA, 21 nt, synthetic construct
  source 1..21: mol_type = other RNA
gagcatataattatacattga

SEQ ID NO: 17988 - RNA, 21 nt, synthetic construct
  source 1..21: mol_type = other RNA
gagcccagtatttccagacca

SEQ ID NO: 17989 - RNA, 21 nt, synthetic construct
  source 1..21: mol_type = other RNA
gagccgtaacaccacctgagg

SEQ ID NO: 17990 - RNA, 21 nt, synthetic construct
  source 1..21: mol_type = other RNA
gagcctagaacacagagacac

SEQ ID NO: 17991 - RNA, 21 nt, synthetic construct
  source 1..21: mol_type = other RNA
gaggaacacagcattgagagc

SEQ ID NO: 17992 - RNA, 21 nt, synthetic construct
  source 1..21: mol_type = other RNA
gaggagattaataacattttt

SEQ ID NO: 17993 - RNA, 21 nt, synthetic construct
  source 1..21: mol_type = other RNA
gaggagcatataattatacat

SEQ ID NO: 17994 - RNA, 21 nt, synthetic construct
  source 1..21: mol_type = other RNA
gaggccaaggtaaaagaattg

SEQ ID NO: 17995 - RNA, 21 nt, synthetic construct
  source 1..21: mol_type = other RNA
gagggagtggagaaaggcttc

SEQ ID NO: 17996 - RNA, 21 nt, synthetic construct
  source 1..21: mol_type = other RNA
gaggggaaaaaagtaatgaat

SEQ ID NO: 17997 - RNA, 21 nt, synthetic construct
  source 1..21: mol_type = other RNA
gagtaccagaggaacacagca

SEQ ID NO: 17998 - RNA, 21 nt, synthetic construct
  source 1..21: mol_type = other RNA
gagtgaaatgtctttaatgac

SEQ ID NO: 17999 - RNA, 21 nt, synthetic construct
  source 1..21: mol_type = other RNA
gagtggagaaaggcttcagag

SEQ ID NO: 18000 - RNA, 21 nt, synthetic construct
  source 1..21: mol_type = other RNA
gagttaagaagtctaggtctg

SEQ ID NO: 18001 - RNA, 21 nt, synthetic construct
  source 1..21: mol_type = other RNA
gagttagatcaatgctaaatg

SEQ ID NO: 18002 - RNA, 21 nt, synthetic construct
  source 1..21: mol_type = other RNA
gatatgtggtcatctaggacc

SEQ ID NO: 18003 - RNA, 21 nt, synthetic construct
  source 1..21: mol_type = other RNA
gatcaatgctaaatgaaatca

SEQ ID NO: 18004 - RNA, 21 nt, synthetic construct
  source 1..21: mol_type = other RNA
gatcactgtttccaaaagaac

SEQ ID NO: 18005 - RNA, 21 nt, synthetic construct
  source 1..21: mol_type = other RNA
gatccattccaaaaaacactt

SEQ ID NO: 18006 - RNA, 21 nt, synthetic construct
  source 1..21: mol_type = other RNA
gatctaactcaatgtggaaga

SEQ ID NO: 18007 - RNA, 21 nt, synthetic construct
  source 1..21: mol_type = other RNA
gatgaccacatatccattgtt

SEQ ID NO: 18008 - RNA, 21 nt, synthetic construct
  source 1..21: mol_type = other RNA
gatgatgtcttaatgtattgc

SEQ ID NO: 18009 - RNA, 21 nt, synthetic construct
  source 1..21: mol_type = other RNA
gatgggcaagctgcttgtgac

SEQ ID NO: 18010 - RNA, 21 nt, synthetic construct
  source 1..21: mol_type = other RNA
gatggttaagacatataaggt

SEQ ID NO: 18011 - RNA, 21 nt, synthetic construct
  source 1..21: mol_type = other RNA
gatgtcttaatgtattgccca

SEQ ID NO: 18012 - RNA, 21 nt, synthetic construct
  source 1..21: mol_type = other RNA
gattaactatgttcacctacc

SEQ ID NO: 18013 - RNA, 21 nt, synthetic construct
  source 1..21: mol_type = other RNA
gattcaattctagtttggtcc

SEQ ID NO: 18014 - RNA, 21 nt, synthetic construct
  source 1..21: mol_type = other RNA
gatttatacagagtaccagag

SEQ ID NO: 18015 - RNA, 21 nt, synthetic construct
  source 1..21: mol_type = other RNA
gatttcatttagcattgatct

SEQ ID NO: 18016 - RNA, 21 nt, synthetic construct
  source 1..21: mol_type = other RNA
gattttaagagatttacaagt

SEQ ID NO: 18017 - RNA, 21 nt, synthetic construct
  source 1..21: mol_type = other RNA
gattttcaatttcaagcaacg

SEQ ID NO: 18018 - RNA, 21 nt, synthetic construct
  source 1..21: mol_type = other RNA
gattttgtgacaatatacaag

SEQ ID NO: 18019 - RNA, 21 nt, synthetic construct
  source 1..21: mol_type = other RNA
gcaaagttaaatacaatttca

SEQ ID NO: 18020 - RNA, 21 nt, synthetic construct
  source 1..21: mol_type = other RNA
gcaaatattggtatatataga

SEQ ID NO: 18021 - RNA, 21 nt, synthetic construct
  source 1..21: mol_type = other RNA
gcaacgtggaactgttttctt

SEQ ID NO: 18022 - RNA, 21 nt, synthetic construct
  source 1..21: mol_type = other RNA
gcaactaacttaataggtaat

SEQ ID NO: 18023 - RNA, 21 nt, synthetic construct
  source 1..21: mol_type = other RNA
gcaagctgcttgtgacattga

SEQ ID NO: 18024 - RNA, 21 nt, synthetic construct
  source 1..21: mol_type = other RNA
gcaagttaacacggcttaatg

SEQ ID NO: 18025 - RNA, 21 nt, synthetic construct
  source 1..21: mol_type = other RNA
gcaatacattaagacatcatc

SEQ ID NO: 18026 - RNA, 21 nt, synthetic construct
  source 1..21: mol_type = other RNA
gcacatggtaaagagcctaga

SEQ ID NO: 18027 - RNA, 21 nt, synthetic construct
  source 1..21: mol_type = other RNA
gcacgaatgtaaccttcttcc

SEQ ID NO: 18028 - RNA, 21 nt, synthetic construct
  source 1..21: mol_type = other RNA
gcagacctagacttcttaact

SEQ ID NO: 18029 - RNA, 21 nt, synthetic construct
  source 1..21: mol_type = other RNA
gcagcttgcccatcataagtt

SEQ ID NO: 18030 - RNA, 21 nt, synthetic construct
  source 1..21: mol_type = other RNA
gcatacttaattcattacttt

SEQ ID NO: 18031 - RNA, 21 nt, synthetic construct
  source 1..21: mol_type = other RNA
gcatcaccttatatgtcttaa

SEQ ID NO: 18032 - RNA, 21 nt, synthetic construct
  source 1..21: mol_type = other RNA
gcatgggcaatacattaagac

SEQ ID NO: 18033 - RNA, 21 nt, synthetic construct
  source 1..21: mol_type = other RNA
gcattgaatgtgtagtttata

SEQ ID NO: 18034 - RNA, 21 nt, synthetic construct
  source 1..21: mol_type = other RNA
gcattgagagccgtaacacca

SEQ ID NO: 18035 - RNA, 21 nt, synthetic construct
  source 1..21: mol_type = other RNA
gcattgatctaactcaatgtg

SEQ ID NO: 18036 - RNA, 21 nt, synthetic construct
  source 1..21: mol_type = other RNA
gcatttctcaaactgtacttt

SEQ ID NO: 18037 - RNA, 21 nt, synthetic construct
  source 1..21: mol_type = other RNA
gccaaggtaaaagaattgctt

SEQ ID NO: 18038 - RNA, 21 nt, synthetic construct
  source 1..21: mol_type = other RNA
gcccagaaaaggtaaggttgg

SEQ ID NO: 18039 - RNA, 21 nt, synthetic construct
  source 1..21: mol_type = other RNA
gcccagtatttccagaccagc

SEQ ID NO: 18040 - RNA, 21 nt, synthetic construct
  source 1..21: mol_type = other RNA
gcccatcataagtttttctga

SEQ ID NO: 18041 - RNA, 21 nt, synthetic construct
  source 1..21: mol_type = other RNA
gcccatgctggtctggaaata

SEQ ID NO: 18042 - RNA, 21 nt, synthetic construct
  source 1..21: mol_type = other RNA
gccgtaacaccacctgaggga

SEQ ID NO: 18043 - RNA, 21 nt, synthetic construct
  source 1..21: mol_type = other RNA
gccgtgttaacttgcacgaat

SEQ ID NO: 18044 - RNA, 21 nt, synthetic construct
  source 1..21: mol_type = other RNA
gcctagaacacagagacacag

SEQ ID NO: 18045 - RNA, 21 nt, synthetic construct
  source 1..21: mol_type = other RNA
gcctttctccactccctcagg

SEQ ID NO: 18046 - RNA, 21 nt, synthetic construct
  source 1..21: mol_type = other RNA
gctaaatgaaatcaaagaaat

SEQ ID NO: 18047 - RNA, 21 nt, synthetic construct
  source 1..21: mol_type = other RNA
gctaacaaacttcagaaaaac

SEQ ID NO: 18048 - RNA, 21 nt, synthetic construct
  source 1..21: mol_type = other RNA
gctatggtgactacctgtttt

SEQ ID NO: 18049 - RNA, 21 nt, synthetic construct
  source 1..21: mol_type = other RNA
gctcaagcaattcttttacct

SEQ ID NO: 18050 - RNA, 21 nt, synthetic construct
  source 1..21: mol_type = other RNA
gctcatttctttgatttcatt

SEQ ID NO: 18051 - RNA, 21 nt, synthetic construct
  source 1..21: mol_type = other RNA
gctcctcattttttgtcacta

SEQ ID NO: 18052 - RNA, 21 nt, synthetic construct
  source 1..21: mol_type = other RNA
gctcgttgaaggaacaatgga

SEQ ID NO: 18053 - RNA, 21 nt, synthetic construct
  source 1..21: mol_type = other RNA
gctctcaatgctgtgttcctc

SEQ ID NO: 18054 - RNA, 21 nt, synthetic construct
  source 1..21: mol_type = other RNA
gctctttaccatgtgctcgtt

SEQ ID NO: 18055 - RNA, 21 nt, synthetic construct
  source 1..21: mol_type = other RNA
gctgcttgtgacattgaaggt

SEQ ID NO: 18056 - RNA, 21 nt, synthetic construct
  source 1..21: mol_type = other RNA
gctggtctggaaatactgggc

SEQ ID NO: 18057 - RNA, 21 nt, synthetic construct
  source 1..21: mol_type = other RNA
gctgtattataaactacacat

SEQ ID NO: 18058 - RNA, 21 nt, synthetic construct
  source 1..21: mol_type = other RNA
gctgtgttcctctggtactct

SEQ ID NO: 18059 - RNA, 21 nt, synthetic construct
  source 1..21: mol_type = other RNA
gcttaatgattaactatgttc

SEQ ID NO: 18060 - RNA, 21 nt, synthetic construct
  source 1..21: mol_type = other RNA
gcttagtaacaattttgataa

SEQ ID NO: 18061 - RNA, 21 nt, synthetic construct
  source 1..21: mol_type = other RNA
gcttcagagagaaagtgtttt

SEQ ID NO: 18062 - RNA, 21 nt, synthetic construct
  source 1..21: mol_type = other RNA
gcttccagaagaaaacagttc

SEQ ID NO: 18063 - RNA, 21 nt, synthetic construct
  source 1..21: mol_type = other RNA
gcttgagcccagtatttccag

SEQ ID NO: 18064 - RNA, 21 nt, synthetic construct
  source 1..21: mol_type = other RNA
gcttgcccatcataagttttt

SEQ ID NO: 18065 - RNA, 21 nt, synthetic construct
  source 1..21: mol_type = other RNA
gcttgtgacattgaaggtatt

SEQ ID NO: 18066 - RNA, 21 nt, synthetic construct
  source 1..21: mol_type = other RNA
gcttttaaaaacaggtagtca

SEQ ID NO: 18067 - RNA, 21 nt, synthetic construct
  source 1..21: mol_type = other RNA
ggaaaaaagtaatgaattaag

SEQ ID NO: 18068 - RNA, 21 nt, synthetic construct
  source 1..21: mol_type = other RNA
ggaaacagtgatccattccaa

SEQ ID NO: 18069 - RNA, 21 nt, synthetic construct
  source 1..21: mol_type = other RNA
ggaaatactgggctcaagcaa

SEQ ID NO: 18070 - RNA, 21 nt, synthetic construct
  source 1..21: mol_type = other RNA
ggaacaatggatatgtggtca

SEQ ID NO: 18071 - RNA, 21 nt, synthetic construct
  source 1..21: mol_type = other RNA
ggaacacagcattgagagccg

SEQ ID NO: 18072 - RNA, 21 nt, synthetic construct
  source 1..21: mol_type = other RNA
ggaactgttttcttctggaag

SEQ ID NO: 18073 - RNA, 21 nt, synthetic construct
  source 1..21: mol_type = other RNA
ggaagaaggttacattcgtgc

SEQ ID NO: 18074 - RNA, 21 nt, synthetic construct
  source 1..21: mol_type = other RNA
ggaagcagacctagacttctt

SEQ ID NO: 18075 - RNA, 21 nt, synthetic construct
  source 1..21: mol_type = other RNA
ggaatggatcactgtttccaa

SEQ ID NO: 18076 - RNA, 21 nt, synthetic construct
  source 1..21: mol_type = other RNA
ggaccaaactagaattgaatc

SEQ ID NO: 18077 - RNA, 21 nt, synthetic construct
  source 1..21: mol_type = other RNA
ggagaaaagggagtgaaatgt

SEQ ID NO: 18078 - RNA, 21 nt, synthetic construct
  source 1..21: mol_type = other RNA
ggagaaaggcttcagagagaa

SEQ ID NO: 18079 - RNA, 21 nt, synthetic construct
  source 1..21: mol_type = other RNA
ggagcatataattatacattg

SEQ ID NO: 18080 - RNA, 21 nt, synthetic construct
  source 1..21: mol_type = other RNA
ggaggccaaggtaaaagaatt

SEQ ID NO: 18081 - RNA, 21 nt, synthetic construct
  source 1..21: mol_type = other RNA
ggagtgaaatgtctttaatga

SEQ ID NO: 18082 - RNA, 21 nt, synthetic construct
  source 1..21: mol_type = other RNA
ggagtggagaaaggcttcaga

SEQ ID NO: 18083 - RNA, 21 nt, synthetic construct
  source 1..21: mol_type = other RNA
ggatatgtggtcatctaggac

SEQ ID NO: 18084 - RNA, 21 nt, synthetic construct
  source 1..21: mol_type = other RNA
ggatcactgtttccaaaagaa

SEQ ID NO: 18085 - RNA, 21 nt, synthetic construct
  source 1..21: mol_type = other RNA
ggatggttaagacatataagg

SEQ ID NO: 18086 - RNA, 21 nt, synthetic construct
  source 1..21: mol_type = other RNA
ggattttgtgacaatatacaa

SEQ ID NO: 18087 - RNA, 21 nt, synthetic construct
  source 1..21: mol_type = other RNA
ggcaaatattggtatatatag

SEQ ID NO: 18088 - RNA, 21 nt, synthetic construct
  source 1..21: mol_type = other RNA
ggcaagctgcttgtgacattg

SEQ ID NO: 18089 - RNA, 21 nt, synthetic construct
  source 1..21: mol_type = other RNA
ggcaatacattaagacatcat

SEQ ID NO: 18090 - RNA, 21 nt, synthetic construct
  source 1..21: mol_type = other RNA
ggccaaggtaaaagaattgct

SEQ ID NO: 18091 - RNA, 21 nt, synthetic construct
  source 1..21: mol_type = other RNA
ggctcaagcaattcttttacc

SEQ ID NO: 18092 - RNA, 21 nt, synthetic construct
  source 1..21: mol_type = other RNA
ggctctcaatgctgtgttcct

SEQ ID NO: 18093 - RNA, 21 nt, synthetic construct
  source 1..21: mol_type = other RNA
ggctctttaccatgtgctcgt

SEQ ID NO: 18094 - RNA, 21 nt, synthetic construct
  source 1..21: mol_type = other RNA
ggcttaatgattaactatgtt

SEQ ID NO: 18095 - RNA, 21 nt, synthetic construct
  source 1..21: mol_type = other RNA
ggcttcagagagaaagtgttt

SEQ ID NO: 18096 - RNA, 21 nt, synthetic construct
  source 1..21: mol_type = other RNA
gggaaaaaagtaatgaattaa

SEQ ID NO: 18097 - RNA, 21 nt, synthetic construct
  source 1..21: mol_type = other RNA
gggaggccaaggtaaaagaat

SEQ ID NO: 18098 - RNA, 21 nt, synthetic construct
  source 1..21: mol_type = other RNA
gggagtgaaatgtctttaatg

SEQ ID NO: 18099 - RNA, 21 nt, synthetic construct
  source 1..21: mol_type = other RNA
gggagtggagaaaggcttcag

SEQ ID NO: 18100 - RNA, 21 nt, synthetic construct
  source 1..21: mol_type = other RNA
gggattttgtgacaatataca

SEQ ID NO: 18101 - RNA, 21 nt, synthetic construct
  source 1..21: mol_type = other RNA
gggcaaatattggtatatata

SEQ ID NO: 18102 - RNA, 21 nt, synthetic construct
  source 1..21: mol_type = other RNA
gggcaagctgcttgtgacatt

SEQ ID NO: 18103 - RNA, 21 nt, synthetic construct
  source 1..21: mol_type = other RNA
gggcaatacattaagacatca

SEQ ID NO: 18104 - RNA, 21 nt, synthetic construct
  source 1..21: mol_type = other RNA
gggctcaagcaattcttttac

SEQ ID NO: 18105 - RNA, 21 nt, synthetic construct
  source 1..21: mol_type = other RNA
ggggaaaaaagtaatgaatta

SEQ ID NO: 18106 - RNA, 21 nt, synthetic construct
  source 1..21: mol_type = other RNA
ggtaaaagaattgcttgagcc

SEQ ID NO: 18107 - RNA, 21 nt, synthetic construct
  source 1..21: mol_type = other RNA
ggtaaagagcctagaacacag

SEQ ID NO: 18108 - RNA, 21 nt, synthetic construct
  source 1..21: mol_type = other RNA
ggtaaggttggtaggtgaaca

SEQ ID NO: 18109 - RNA, 21 nt, synthetic construct
  source 1..21: mol_type = other RNA
ggtactctgtataaatcaatg

SEQ ID NO: 18110 - RNA, 21 nt, synthetic construct
  source 1..21: mol_type = other RNA
ggtaggtgaacatagttaatc

SEQ ID NO: 18111 - RNA, 21 nt, synthetic construct
  source 1..21: mol_type = other RNA
ggtagtcaccatagcattgaa

SEQ ID NO: 18112 - RNA, 21 nt, synthetic construct
  source 1..21: mol_type = other RNA
ggtatatatagagttaagaag

SEQ ID NO: 18113 - RNA, 21 nt, synthetic construct
  source 1..21: mol_type = other RNA
ggtatttaagattcaattcta

SEQ ID NO: 18114 - RNA, 21 nt, synthetic construct
  source 1..21: mol_type = other RNA
ggtcatctaggaccaaactag

SEQ ID NO: 18115 - RNA, 21 nt, synthetic construct
  source 1..21: mol_type = other RNA
ggtcctagatgaccacatatc

SEQ ID NO: 18116 - RNA, 21 nt, synthetic construct
  source 1..21: mol_type = other RNA
ggtctgcttccagaagaaaac

SEQ ID NO: 18117 - RNA, 21 nt, synthetic construct
  source 1..21: mol_type = other RNA
ggtctggaaatactgggctca

SEQ ID NO: 18118 - RNA, 21 nt, synthetic construct
  source 1..21: mol_type = other RNA
ggtgaacatagttaatcatta

SEQ ID NO: 18119 - RNA, 21 nt, synthetic construct
  source 1..21: mol_type = other RNA
ggtgactacctgtttttaaaa

SEQ ID NO: 18120 - RNA, 21 nt, synthetic construct
  source 1..21: mol_type = other RNA
ggtggtgttacggctctcaat

SEQ ID NO: 18121 - RNA, 21 nt, synthetic construct
  source 1..21: mol_type = other RNA
ggtgttacggctctcaatgct

SEQ ID NO: 18122 - RNA, 21 nt, synthetic construct
  source 1..21: mol_type = other RNA
ggttaagacatataaggtgat

SEQ ID NO: 18123 - RNA, 21 nt, synthetic construct
  source 1..21: mol_type = other RNA
ggttacattcgtgcaagttaa

SEQ ID NO: 18124 - RNA, 21 nt, synthetic construct
  source 1..21: mol_type = other RNA
ggttggtaggtgaacatagtt

SEQ ID NO: 18125 - RNA, 21 nt, synthetic construct
  source 1..21: mol_type = other RNA
gtaaaagaattgcttgagccc

SEQ ID NO: 18126 - RNA, 21 nt, synthetic construct
  source 1..21: mol_type = other RNA
gtaaagagcctagaacacaga

SEQ ID NO: 18127 - RNA, 21 nt, synthetic construct
  source 1..21: mol_type = other RNA
gtaacaccacctgagggagtg

SEQ ID NO: 18128 - RNA, 21 nt, synthetic construct
  source 1..21: mol_type = other RNA
gtaaccttcttccacattgag

SEQ ID NO: 18129 - RNA, 21 nt, synthetic construct
  source 1..21: mol_type = other RNA
gtaaggttggtaggtgaacat

SEQ ID NO: 18130 - RNA, 21 nt, synthetic construct
  source 1..21: mol_type = other RNA
gtaagtgtcattaaagacatt

SEQ ID NO: 18131 - RNA, 21 nt, synthetic construct
  source 1..21: mol_type = other RNA
gtaatgaattaagtatgcatt

SEQ ID NO: 18132 - RNA, 21 nt, synthetic construct
  source 1..21: mol_type = other RNA
gtacagtttgagaaatgcata

SEQ ID NO: 18133 - RNA, 21 nt, synthetic construct
  source 1..21: mol_type = other RNA
gtaccagaggaacacagcatt

SEQ ID NO: 18134 - RNA, 21 nt, synthetic construct
  source 1..21: mol_type = other RNA
gtactctgtataaatcaatgt

SEQ ID NO: 18135 - RNA, 21 nt, synthetic construct
  source 1..21: mol_type = other RNA
gtactttagttcttttggaaa

SEQ ID NO: 18136 - RNA, 21 nt, synthetic construct
  source 1..21: mol_type = other RNA
gtaggtgaacatagttaatca

SEQ ID NO: 18137 - RNA, 21 nt, synthetic construct
  source 1..21: mol_type = other RNA
gtagtcaccatagcattgaat

SEQ ID NO: 18138 - RNA, 21 nt, synthetic construct
  source 1..21: mol_type = other RNA
gtagtttataatacagcaaag

SEQ ID NO: 18139 - RNA, 21 nt, synthetic construct
  source 1..21: mol_type = other RNA
gtataattatatgctcctcat

SEQ ID NO: 18140 - RNA, 21 nt, synthetic construct
  source 1..21: mol_type = other RNA
gtatatatagagttaagaagt

SEQ ID NO: 18141 - RNA, 21 nt, synthetic construct
  source 1..21: mol_type = other RNA
gtatattgtcacaaaatccca

SEQ ID NO: 18142 - RNA, 21 nt, synthetic construct
  source 1..21: mol_type = other RNA
gtatgcatttctcaaactgta

SEQ ID NO: 18143 - RNA, 21 nt, synthetic construct
  source 1..21: mol_type = other RNA
gtattataaactacacattca

SEQ ID NO: 18144 - RNA, 21 nt, synthetic construct
  source 1..21: mol_type = other RNA
gtattgcccatgctggtctgg

SEQ ID NO: 18145 - RNA, 21 nt, synthetic construct
  source 1..21: mol_type = other RNA
gtatttaactttgctgtatta

SEQ ID NO: 18146 - RNA, 21 nt, synthetic construct
  source 1..21: mol_type = other RNA
gtatttaagattcaattctag

SEQ ID NO: 18147 - RNA, 21 nt, synthetic construct
  source 1..21: mol_type = other RNA
gtatttccagaccagcatggg

SEQ ID NO: 18148 - RNA, 21 nt, synthetic construct
  source 1..21: mol_type = other RNA
gtcacaaaatcccatatatag

SEQ ID NO: 18149 - RNA, 21 nt, synthetic construct
  source 1..21: mol_type = other RNA
gtcacaagcagcttgcccatc

SEQ ID NO: 18150 - RNA, 21 nt, synthetic construct
  source 1..21: mol_type = other RNA
gtcaccatagcattgaatgtg

SEQ ID NO: 18151 - RNA, 21 nt, synthetic construct
  source 1..21: mol_type = other RNA
gtcactataattgttaatatg

SEQ ID NO: 18152 - RNA, 21 nt, synthetic construct
  source 1..21: mol_type = other RNA
gtcatctaggaccaaactaga

SEQ ID NO: 18153 - RNA, 21 nt, synthetic construct
  source 1..21: mol_type = other RNA
gtcattaaagacatttcactc

SEQ ID NO: 18154 - RNA, 21 nt, synthetic construct
  source 1..21: mol_type = other RNA
gtcctagatgaccacatatcc

SEQ ID NO: 18155 - RNA, 21 nt, synthetic construct
  source 1..21: mol_type = other RNA
gtctaggtctgcttccagaag

SEQ ID NO: 18156 - RNA, 21 nt, synthetic construct
  source 1..21: mol_type = other RNA
gtctctgtgttctaggctctt

SEQ ID NO: 18157 - RNA, 21 nt, synthetic construct
  source 1..21: mol_type = other RNA
gtctgcttccagaagaaaaca

SEQ ID NO: 18158 - RNA, 21 nt, synthetic construct
  source 1..21: mol_type = other RNA
gtctggaaatactgggctcaa

SEQ ID NO: 18159 - RNA, 21 nt, synthetic construct
  source 1..21: mol_type = other RNA
gtcttaaccatccttgtatat

SEQ ID NO: 18160 - RNA, 21 nt, synthetic construct
  source 1..21: mol_type = other RNA
gtcttaatgtattgcccatgc

SEQ ID NO: 18161 - RNA, 21 nt, synthetic construct
  source 1..21: mol_type = other RNA
gtctttaatgacacttactat

SEQ ID NO: 18162 - RNA, 21 nt, synthetic construct
  source 1..21: mol_type = other RNA
gtgaaatgtctttaatgacac

SEQ ID NO: 18163 - RNA, 21 nt, synthetic construct
  source 1..21: mol_type = other RNA
gtgaacatagttaatcattaa

SEQ ID NO: 18164 - RNA, 21 nt, synthetic construct
  source 1..21: mol_type = other RNA
gtgacaaaaaatgaggagcat

SEQ ID NO: 18165 - RNA, 21 nt, synthetic construct
  source 1..21: mol_type = other RNA
gtgacaatatacaaggatggt

SEQ ID NO: 18166 - RNA, 21 nt, synthetic construct
  source 1..21: mol_type = other RNA
gtgacattgaaggtatttaag

SEQ ID NO: 18167 - RNA, 21 nt, synthetic construct
  source 1..21: mol_type = other RNA
gtgactacctgtttttaaaag

SEQ ID NO: 18168 - RNA, 21 nt, synthetic construct
  source 1..21: mol_type = other RNA
gtgatccattccaaaaaacac

SEQ ID NO: 18169 - RNA, 21 nt, synthetic construct
  source 1..21: mol_type = other RNA
gtgcaagttaacacggcttaa

SEQ ID NO: 18170 - RNA, 21 nt, synthetic construct
  source 1..21: mol_type = other RNA
gtgctcgttgaaggaacaatg

SEQ ID NO: 18171 - RNA, 21 nt, synthetic construct
  source 1..21: mol_type = other RNA
gtggaactgttttcttctgga

SEQ ID NO: 18172 - RNA, 21 nt, synthetic construct
  source 1..21: mol_type = other RNA
gtggaagaaggttacattcgt

SEQ ID NO: 18173 - RNA, 21 nt, synthetic construct
  source 1..21: mol_type = other RNA
gtggagaaaagggagtgaaat

SEQ ID NO: 18174 - RNA, 21 nt, synthetic construct
  source 1..21: mol_type = other RNA
gtggagaaaggcttcagagag

SEQ ID NO: 18175 - RNA, 21 nt, synthetic construct
  source 1..21: mol_type = other RNA
gtggtcatctaggaccaaact

SEQ ID NO: 18176 - RNA, 21 nt, synthetic construct
  source 1..21: mol_type = other RNA
gtggtgttacggctctcaatg

SEQ ID NO: 18177 - RNA, 21 nt, synthetic construct
  source 1..21: mol_type = other RNA
gtgtagtttataatacagcaa

SEQ ID NO: 18178 - RNA, 21 nt, synthetic construct
  source 1..21: mol_type = other RNA
gtgtcattaaagacatttcac

SEQ ID NO: 18179 - RNA, 21 nt, synthetic construct
  source 1..21: mol_type = other RNA
gtgtctctgtgttctaggctc

SEQ ID NO: 18180 - RNA, 21 nt, synthetic construct
  source 1..21: mol_type = other RNA
gtgttaacttgcacgaatgta

SEQ ID NO: 18181 - RNA, 21 nt, synthetic construct
  source 1..21: mol_type = other RNA
gtgttacggctctcaatgctg

SEQ ID NO: 18182 - RNA, 21 nt, synthetic construct
  source 1..21: mol_type = other RNA
gtgttcctctggtactctgta

SEQ ID NO: 18183 - RNA, 21 nt, synthetic construct
  source 1..21: mol_type = other RNA
gtgttctaggctctttaccat

SEQ ID NO: 18184 - RNA, 21 nt, synthetic construct
  source 1..21: mol_type = other RNA
gtgttctgtgtctctgtgttc

SEQ ID NO: 18185 - RNA, 21 nt, synthetic construct
  source 1..21: mol_type = other RNA
gtgttttttggaatggatcac

SEQ ID NO: 18186 - RNA, 21 nt, synthetic construct
  source 1..21: mol_type = other RNA
gttaacacggcttaatgatta

SEQ ID NO: 18187 - RNA, 21 nt, synthetic construct
  source 1..21: mol_type = other RNA
gttaacttgcacgaatgtaac

SEQ ID NO: 18188 - RNA, 21 nt, synthetic construct
  source 1..21: mol_type = other RNA
gttaagaagtctaggtctgct

SEQ ID NO: 18189 - RNA, 21 nt, synthetic construct
  source 1..21: mol_type = other RNA
gttaagacatataaggtgatg

SEQ ID NO: 18190 - RNA, 21 nt, synthetic construct
  source 1..21: mol_type = other RNA
gttaatcattaagccgtgtta

SEQ ID NO: 18191 - RNA, 21 nt, synthetic construct
  source 1..21: mol_type = other RNA
gttacattcgtgcaagttaac

SEQ ID NO: 18192 - RNA, 21 nt, synthetic construct
  source 1..21: mol_type = other RNA
gttacggctctcaatgctgtg

SEQ ID NO: 18193 - RNA, 21 nt, synthetic construct
  source 1..21: mol_type = other RNA
gttactaagctaacaaacttc

SEQ ID NO: 18194 - RNA, 21 nt, synthetic construct
  source 1..21: mol_type = other RNA
gttagatcaatgctaaatgaa

SEQ ID NO: 18195 - RNA, 21 nt, synthetic construct
  source 1..21: mol_type = other RNA
gttagcttagtaacaattttg

SEQ ID NO: 18196 - RNA, 21 nt, synthetic construct
  source 1..21: mol_type = other RNA
gttagttgctcatttctttga

SEQ ID NO: 18197 - RNA, 21 nt, synthetic construct
  source 1..21: mol_type = other RNA
gttattaatctcctctttttg

SEQ ID NO: 18198 - RNA, 21 nt, synthetic construct
  source 1..21: mol_type = other RNA
gttcacctaccaaccttacct

SEQ ID NO: 18199 - RNA, 21 nt, synthetic construct
  source 1..21: mol_type = other RNA
gttccacgttgcttgaaattg

SEQ ID NO: 18200 - RNA, 21 nt, synthetic construct
  source 1..21: mol_type = other RNA
gttcctctggtactctgtata

SEQ ID NO: 18201 - RNA, 21 nt, synthetic construct
  source 1..21: mol_type = other RNA
gttccttcaacgagcacatgg

SEQ ID NO: 18202 - RNA, 21 nt, synthetic construct
  source 1..21: mol_type = other RNA
gttctaggctctttaccatgt

SEQ ID NO: 18203 - RNA, 21 nt, synthetic construct
  source 1..21: mol_type = other RNA
gttctgtgtctctgtgttcta

SEQ ID NO: 18204 - RNA, 21 nt, synthetic construct
  source 1..21: mol_type = other RNA
gttcttttggaaacagtgatc

SEQ ID NO: 18205 - RNA, 21 nt, synthetic construct
  source 1..21: mol_type = other RNA
gttgaaggaacaatggatatg

SEQ ID NO: 18206 - RNA, 21 nt, synthetic construct
  source 1..21: mol_type = other RNA
gttgaggggaaaaaagtaatg

SEQ ID NO: 18207 - RNA, 21 nt, synthetic construct
  source 1..21: mol_type = other RNA
gttgctcatttctttgatttc

SEQ ID NO: 18208 - RNA, 21 nt, synthetic construct
  source 1..21: mol_type = other RNA
gttgcttgaaattgaaaatca

SEQ ID NO: 18209 - RNA, 21 nt, synthetic construct
  source 1..21: mol_type = other RNA
gttggtaggtgaacatagtta

SEQ ID NO: 18210 - RNA, 21 nt, synthetic construct
  source 1..21: mol_type = other RNA
gtttataatacagcaaagtta

SEQ ID NO: 18211 - RNA, 21 nt, synthetic construct
  source 1..21: mol_type = other RNA
gtttccaaaagaactaaagta

SEQ ID NO: 18212 - RNA, 21 nt, synthetic construct
  source 1..21: mol_type = other RNA
gtttgagaaatgcatacttaa

SEQ ID NO: 18213 - RNA, 21 nt, synthetic construct
  source 1..21: mol_type = other RNA
gtttggtcctagatgaccaca

SEQ ID NO: 18214 - RNA, 21 nt, synthetic construct
  source 1..21: mol_type = other RNA
gtttgttagcttagtaacaat

SEQ ID NO: 18215 - RNA, 21 nt, synthetic construct
  source 1..21: mol_type = other RNA
gttttcttctggaagcagacc

SEQ ID NO: 18216 - RNA, 21 nt, synthetic construct
  source 1..21: mol_type = other RNA
gtttttctgaagtttgttagc

SEQ ID NO: 18217 - RNA, 21 nt, synthetic construct
  source 1..21: mol_type = other RNA
gttttttggaatggatcactg

SEQ ID NO: 18218 - RNA, 21 nt, synthetic construct
  source 1..21: mol_type = other RNA
taaaaacaggtagtcaccata

SEQ ID NO: 18219 - RNA, 21 nt, synthetic construct
  source 1..21: mol_type = other RNA
taaaagaattgcttgagccca

SEQ ID NO: 18220 - RNA, 21 nt, synthetic construct
  source 1..21: mol_type = other RNA
taaactacacattcaatgcta

SEQ ID NO: 18221 - RNA, 21 nt, synthetic construct
  source 1..21: mol_type = other RNA
taaacttttttgttgggtaaa

SEQ ID NO: 18222 - RNA, 21 nt, synthetic construct
  source 1..21: mol_type = other RNA
taaagacatttcactcccttt

SEQ ID NO: 18223 - RNA, 21 nt, synthetic construct
  source 1..21: mol_type = other RNA
taaagagcctagaacacagag

SEQ ID NO: 18224 - RNA, 21 nt, synthetic construct
  source 1..21: mol_type = other RNA
taaagatgatgtcttaatgta

SEQ ID NO: 18225 - RNA, 21 nt, synthetic construct
  source 1..21: mol_type = other RNA
taaagtacagtttgagaaatg

SEQ ID NO: 18226 - RNA, 21 nt, synthetic construct
  source 1..21: mol_type = other RNA
taaagttgaggggaaaaaagt

SEQ ID NO: 18227 - RNA, 21 nt, synthetic construct
  source 1..21: mol_type = other RNA
taaataccttcaatgtcacaa

SEQ ID NO: 18228 - RNA, 21 nt, synthetic construct
  source 1..21: mol_type = other RNA
taaatttacccaacaaaaaag

SEQ ID NO: 18229 - RNA, 21 nt, synthetic construct
  source 1..21: mol_type = other RNA
taacaaaaagaggagattaat

SEQ ID NO: 18230 - RNA, 21 nt, synthetic construct
  source 1..21: mol_type = other RNA
taacaaacttcagaaaaactt

SEQ ID NO: 18231 - RNA, 21 nt, synthetic construct
  source 1..21: mol_type = other RNA
taacaccacctgagggagtgg

SEQ ID NO: 18232 - RNA, 21 nt, synthetic construct
  source 1..21: mol_type = other RNA
taacacggcttaatgattaac

SEQ ID NO: 18233 - RNA, 21 nt, synthetic construct
  source 1..21: mol_type = other RNA
taaccatccttgtatattgtc

SEQ ID NO: 18234 - RNA, 21 nt, synthetic construct
  source 1..21: mol_type = other RNA
taaccttcttccacattgagt

SEQ ID NO: 18235 - RNA, 21 nt, synthetic construct
  source 1..21: mol_type = other RNA
taactatgttcacctaccaac

SEQ ID NO: 18236 - RNA, 21 nt, synthetic construct
  source 1..21: mol_type = other RNA
taactcaatgtggaagaaggt

SEQ ID NO: 18237 - RNA, 21 nt, synthetic construct
  source 1..21: mol_type = other RNA
taacttgcacgaatgtaacct

SEQ ID NO: 18238 - RNA, 21 nt, synthetic construct
  source 1..21: mol_type = other RNA
taactttgctgtattataaac

SEQ ID NO: 18239 - RNA, 21 nt, synthetic construct
  source 1..21: mol_type = other RNA
taagaagtctaggtctgcttc

SEQ ID NO: 18240 - RNA, 21 nt, synthetic construct
  source 1..21: mol_type = other RNA
taagacatataaggtgatgca

SEQ ID NO: 18241 - RNA, 21 nt, synthetic construct
  source 1..21: mol_type = other RNA
taagagatttacaagtcaaaa

SEQ ID NO: 18242 - RNA, 21 nt, synthetic construct
  source 1..21: mol_type = other RNA
taagattcaattctagtttgg

SEQ ID NO: 18243 - RNA, 21 nt, synthetic construct
  source 1..21: mol_type = other RNA
taagccgtgttaacttgcacg

SEQ ID NO: 18244 - RNA, 21 nt, synthetic construct
  source 1..21: mol_type = other RNA
taagctaacaaacttcagaaa

SEQ ID NO: 18245 - RNA, 21 nt, synthetic construct
  source 1..21: mol_type = other RNA
taaggttggtaggtgaacata

SEQ ID NO: 18246 - RNA, 21 nt, synthetic construct
  source 1..21: mol_type = other RNA
taagtatgcatttctcaaact

SEQ ID NO: 18247 - RNA, 21 nt, synthetic construct
  source 1..21: mol_type = other RNA
taagtgtcattaaagacattt

SEQ ID NO: 18248 - RNA, 21 nt, synthetic construct
  source 1..21: mol_type = other RNA
taagttagttgctcatttctt

SEQ ID NO: 18249 - RNA, 21 nt, synthetic construct
  source 1..21: mol_type = other RNA
taagtttttctgaagtttgtt

SEQ ID NO: 18250 - RNA, 21 nt, synthetic construct
  source 1..21: mol_type = other RNA
taatacagcaaagttaaatac

SEQ ID NO: 18251 - RNA, 21 nt, synthetic construct
  source 1..21: mol_type = other RNA
taatcattaagccgtgttaac

SEQ ID NO: 18252 - RNA, 21 nt, synthetic construct
  source 1..21: mol_type = other RNA
taatctcctctttttgttaaa

SEQ ID NO: 18253 - RNA, 21 nt, synthetic construct
  source 1..21: mol_type = other RNA
taatgacacttactatatatg

SEQ ID NO: 18254 - RNA, 21 nt, synthetic construct
  source 1..21: mol_type = other RNA
taatgattaactatgttcacc

SEQ ID NO: 18255 - RNA, 21 nt, synthetic construct
  source 1..21: mol_type = other RNA
taatgtattgcccatgctggt

SEQ ID NO: 18256 - RNA, 21 nt, synthetic construct
  source 1..21: mol_type = other RNA
taattatatgctcctcatttt

SEQ ID NO: 18257 - RNA, 21 nt, synthetic construct
  source 1..21: mol_type = other RNA
taattcattacttttttcccc

SEQ ID NO: 18258 - RNA, 21 nt, synthetic construct
  source 1..21: mol_type = other RNA
tacaaggatggttaagacata

SEQ ID NO: 18259 - RNA, 21 nt, synthetic construct
  source 1..21: mol_type = other RNA
tacacattcaatgctatggtg

SEQ ID NO: 18260 - RNA, 21 nt, synthetic construct
  source 1..21: mol_type = other RNA
tacagagtaccagaggaacac

SEQ ID NO: 18261 - RNA, 21 nt, synthetic construct
  source 1..21: mol_type = other RNA
tacagcaaagttaaatacaat

SEQ ID NO: 18262 - RNA, 21 nt, synthetic construct
  source 1..21: mol_type = other RNA
tacagtttgagaaatgcatac

SEQ ID NO: 18263 - RNA, 21 nt, synthetic construct
  source 1..21: mol_type = other RNA
tacattaagacatcatcttta

SEQ ID NO: 18264 - RNA, 21 nt, synthetic construct
  source 1..21: mol_type = other RNA
tacattcgtgcaagttaacac

SEQ ID NO: 18265 - RNA, 21 nt, synthetic construct
  source 1..21: mol_type = other RNA
tacattgatttatacagagta

SEQ ID NO: 18266 - RNA, 21 nt, synthetic construct
  source 1..21: mol_type = other RNA
tacatttaacaaaaagaggag

SEQ ID NO: 18267 - RNA, 21 nt, synthetic construct
  source 1..21: mol_type = other RNA
taccaaccttaccttttctgg

SEQ ID NO: 18268 - RNA, 21 nt, synthetic construct
  source 1..21: mol_type = other RNA
taccaatatttgcccagaaaa

SEQ ID NO: 18269 - RNA, 21 nt, synthetic construct
  source 1..21: mol_type = other RNA
taccagaggaacacagcattg

SEQ ID NO: 18270 - RNA, 21 nt, synthetic construct
  source 1..21: mol_type = other RNA
taccatgtgctcgttgaagga

SEQ ID NO: 18271 - RNA, 21 nt, synthetic construct
  source 1..21: mol_type = other RNA
tacccaacaaaaaagtttatt

SEQ ID NO: 18272 - RNA, 21 nt, synthetic construct
  source 1..21: mol_type = other RNA
tacctattaagttagttgctc

SEQ ID NO: 18273 - RNA, 21 nt, synthetic construct
  source 1..21: mol_type = other RNA
tacctgtttttaaaagctaat

SEQ ID NO: 18274 - RNA, 21 nt, synthetic construct
  source 1..21: mol_type = other RNA
taccttcaatgtcacaagcag

SEQ ID NO: 18275 - RNA, 21 nt, synthetic construct
  source 1..21: mol_type = other RNA
taccttttctgggcaaatatt

SEQ ID NO: 18276 - RNA, 21 nt, synthetic construct
  source 1..21: mol_type = other RNA
tacggctctcaatgctgtgtt

SEQ ID NO: 18277 - RNA, 21 nt, synthetic construct
  source 1..21: mol_type = other RNA
tactaagctaacaaacttcag

SEQ ID NO: 18278 - RNA, 21 nt, synthetic construct
  source 1..21: mol_type = other RNA
tactatatatgggattttgtg

SEQ ID NO: 18279 - RNA, 21 nt, synthetic construct
  source 1..21: mol_type = other RNA
tactctgtataaatcaatgta

SEQ ID NO: 18280 - RNA, 21 nt, synthetic construct
  source 1..21: mol_type = other RNA
tactgggctcaagcaattctt

SEQ ID NO: 18281 - RNA, 21 nt, synthetic construct
  source 1..21: mol_type = other RNA
tactttagttcttttggaaac

SEQ ID NO: 18282 - RNA, 21 nt, synthetic construct
  source 1..21: mol_type = other RNA
tacttttttcccctcaacttt

SEQ ID NO: 18283 - RNA, 21 nt, synthetic construct
  source 1..21: mol_type = other RNA
tagaacacagagacacagaac

SEQ ID NO: 18284 - RNA, 21 nt, synthetic construct
  source 1..21: mol_type = other RNA
tagaattgaatcttaaatacc

SEQ ID NO: 18285 - RNA, 21 nt, synthetic construct
  source 1..21: mol_type = other RNA
tagacttcttaactctatata

SEQ ID NO: 18286 - RNA, 21 nt, synthetic construct
  source 1..21: mol_type = other RNA
tagagttaagaagtctaggtc

SEQ ID NO: 18287 - RNA, 21 nt, synthetic construct
  source 1..21: mol_type = other RNA
tagatcaatgctaaatgaaat

SEQ ID NO: 18288 - RNA, 21 nt, synthetic construct
  source 1..21: mol_type = other RNA
tagatgaccacatatccattg

SEQ ID NO: 18289 - RNA, 21 nt, synthetic construct
  source 1..21: mol_type = other RNA
tagcattgaatgtgtagttta

SEQ ID NO: 18290 - RNA, 21 nt, synthetic construct
  source 1..21: mol_type = other RNA
tagcattgatctaactcaatg

SEQ ID NO: 18291 - RNA, 21 nt, synthetic construct
  source 1..21: mol_type = other RNA
tagcttagtaacaattttgat

SEQ ID NO: 18292 - RNA, 21 nt, synthetic construct
  source 1..21: mol_type = other RNA
tagcttttaaaaacaggtagt

SEQ ID NO: 18293 - RNA, 21 nt, synthetic construct
  source 1..21: mol_type = other RNA
taggaccaaactagaattgaa

SEQ ID NO: 18294 - RNA, 21 nt, synthetic construct
  source 1..21: mol_type = other RNA
taggctctttaccatgtgctc

SEQ ID NO: 18295 - RNA, 21 nt, synthetic construct
  source 1..21: mol_type = other RNA
taggtctgcttccagaagaaa

SEQ ID NO: 18296 - RNA, 21 nt, synthetic construct
  source 1..21: mol_type = other RNA
taggtgaacatagttaatcat

SEQ ID NO: 18297 - RNA, 21 nt, synthetic construct
  source 1..21: mol_type = other RNA
tagtaagtgtcattaaagaca

SEQ ID NO: 18298 - RNA, 21 nt, synthetic construct
  source 1..21: mol_type = other RNA
tagtcaccatagcattgaatg

SEQ ID NO: 18299 - RNA, 21 nt, synthetic construct
  source 1..21: mol_type = other RNA
tagtgacaaaaaatgaggagc

SEQ ID NO: 18300 - RNA, 21 nt, synthetic construct
  source 1..21: mol_type = other RNA
tagttaatcattaagccgtgt

SEQ ID NO: 18301 - RNA, 21 nt, synthetic construct
  source 1..21: mol_type = other RNA
tagttcttttggaaacagtga

SEQ ID NO: 18302 - RNA, 21 nt, synthetic construct
  source 1..21: mol_type = other RNA
tagttgctcatttctttgatt

SEQ ID NO: 18303 - RNA, 21 nt, synthetic construct
  source 1..21: mol_type = other RNA
tagtttataatacagcaaagt

SEQ ID NO: 18304 - RNA, 21 nt, synthetic construct
  source 1..21: mol_type = other RNA
tagtttggtcctagatgacca

SEQ ID NO: 18305 - RNA, 21 nt, synthetic construct
  source 1..21: mol_type = other RNA
tataaactacacattcaatgc

SEQ ID NO: 18306 - RNA, 21 nt, synthetic construct
  source 1..21: mol_type = other RNA
tataattatatgctcctcatt

SEQ ID NO: 18307 - RNA, 21 nt, synthetic construct
  source 1..21: mol_type = other RNA
tatacaaggatggttaagaca

SEQ ID NO: 18308 - RNA, 21 nt, synthetic construct
  source 1..21: mol_type = other RNA
tatacagagtaccagaggaac

SEQ ID NO: 18309 - RNA, 21 nt, synthetic construct
  source 1..21: mol_type = other RNA
tatacattgatttatacagag

SEQ ID NO: 18310 - RNA, 21 nt, synthetic construct
  source 1..21: mol_type = other RNA
tatacatttaacaaaaagagg

SEQ ID NO: 18311 - RNA, 21 nt, synthetic construct
  source 1..21: mol_type = other RNA
tataccaatatttgcccagaa

SEQ ID NO: 18312 - RNA, 21 nt, synthetic construct
  source 1..21: mol_type = other RNA
tatagagttaagaagtctagg

SEQ ID NO: 18313 - RNA, 21 nt, synthetic construct
  source 1..21: mol_type = other RNA
tatagtaagtgtcattaaaga

SEQ ID NO: 18314 - RNA, 21 nt, synthetic construct
  source 1..21: mol_type = other RNA
tatagtgacaaaaaatgagga

SEQ ID NO: 18315 - RNA, 21 nt, synthetic construct
  source 1..21: mol_type = other RNA
tatataccaatatttgcccag

SEQ ID NO: 18316 - RNA, 21 nt, synthetic construct
  source 1..21: mol_type = other RNA
tatatagagttaagaagtcta

SEQ ID NO: 18317 - RNA, 21 nt, synthetic construct
  source 1..21: mol_type = other RNA
tatatataccaatatttgccc

SEQ ID NO: 18318 - RNA, 21 nt, synthetic construct
  source 1..21: mol_type = other RNA
tatatatagagttaagaagtc

SEQ ID NO: 18319 - RNA, 21 nt, synthetic construct
  source 1..21: mol_type = other RNA
tatatatgggattttgtgaca

SEQ ID NO: 18320 - RNA, 21 nt, synthetic construct
  source 1..21: mol_type = other RNA
tatatgctcctcattttttgt

SEQ ID NO: 18321 - RNA, 21 nt, synthetic construct
  source 1..21: mol_type = other RNA
tatatgggattttgtgacaat

SEQ ID NO: 18322 - RNA, 21 nt, synthetic construct
  source 1..21: mol_type = other RNA
tatatgtcttaaccatccttg

SEQ ID NO: 18323 - RNA, 21 nt, synthetic construct
  source 1..21: mol_type = other RNA
tatattgtcacaaaatcccat

SEQ ID NO: 18324 - RNA, 21 nt, synthetic construct
  source 1..21: mol_type = other RNA
tatcaaaattgttactaagct

SEQ ID NO: 18325 - RNA, 21 nt, synthetic construct
  source 1..21: mol_type = other RNA
tatccattgttccttcaacga

SEQ ID NO: 18326 - RNA, 21 nt, synthetic construct
  source 1..21: mol_type = other RNA
tatgatgggcaagctgcttgt

SEQ ID NO: 18327 - RNA, 21 nt, synthetic construct
  source 1..21: mol_type = other RNA
tatgcatttctcaaactgtac

SEQ ID NO: 18328 - RNA, 21 nt, synthetic construct
  source 1..21: mol_type = other RNA
tatgctcctcattttttgtca

SEQ ID NO: 18329 - RNA, 21 nt, synthetic construct
  source 1..21: mol_type = other RNA
tatgggattttgtgacaatat

SEQ ID NO: 18330 - RNA, 21 nt, synthetic construct
  source 1..21: mol_type = other RNA
tatggtgactacctgttttta

SEQ ID NO: 18331 - RNA, 21 nt, synthetic construct
  source 1..21: mol_type = other RNA
tatgtcttaaccatccttgta

SEQ ID NO: 18332 - RNA, 21 nt, synthetic construct
  source 1..21: mol_type = other RNA
tatgtggtcatctaggaccaa

SEQ ID NO: 18333 - RNA, 21 nt, synthetic construct
  source 1..21: mol_type = other RNA
tatgttcacctaccaacctta

SEQ ID NO: 18334 - RNA, 21 nt, synthetic construct
  source 1..21: mol_type = other RNA
tattaaagttgaggggaaaaa

SEQ ID NO: 18335 - RNA, 21 nt, synthetic construct
  source 1..21: mol_type = other RNA
tattaagttagttgctcattt

SEQ ID NO: 18336 - RNA, 21 nt, synthetic construct
  source 1..21: mol_type = other RNA
tattaatctcctctttttgtt

SEQ ID NO: 18337 - RNA, 21 nt, synthetic construct
  source 1..21: mol_type = other RNA
tattattaaagttgaggggaa

SEQ ID NO: 18338 - RNA, 21 nt, synthetic construct
  source 1..21: mol_type = other RNA
tattgcccatgctggtctgga

SEQ ID NO: 18339 - RNA, 21 nt, synthetic construct
  source 1..21: mol_type = other RNA
tattgtcacaaaatcccatat

SEQ ID NO: 18340 - RNA, 21 nt, synthetic construct
  source 1..21: mol_type = other RNA
tatttccagaccagcatgggc

SEQ ID NO: 18341 - RNA, 21 nt, synthetic construct
  source 1..21: mol_type = other RNA
tatttgcccagaaaaggtaag

SEQ ID NO: 18342 - RNA, 21 nt, synthetic construct
  source 1..21: mol_type = other RNA
tatttttgacttgtaaatctc

SEQ ID NO: 18343 - RNA, 21 nt, synthetic construct
  source 1..21: mol_type = other RNA
tcaaaattgttactaagctaa

SEQ ID NO: 18344 - RNA, 21 nt, synthetic construct
  source 1..21: mol_type = other RNA
tcaaactgtactttagttctt

SEQ ID NO: 18345 - RNA, 21 nt, synthetic construct
  source 1..21: mol_type = other RNA
tcaaagaaatgagcaactaac

SEQ ID NO: 18346 - RNA, 21 nt, synthetic construct
  source 1..21: mol_type = other RNA
tcaaattacctattaagttag

SEQ ID NO: 18347 - RNA, 21 nt, synthetic construct
  source 1..21: mol_type = other RNA
tcaacgagcacatggtaaaga

SEQ ID NO: 18348 - RNA, 21 nt, synthetic construct
  source 1..21: mol_type = other RNA
tcaagcaacgtggaactgttt

SEQ ID NO: 18349 - RNA, 21 nt, synthetic construct
  source 1..21: mol_type = other RNA
tcaagcaattcttttaccttg

SEQ ID NO: 18350 - RNA, 21 nt, synthetic construct
  source 1..21: mol_type = other RNA
tcaatgctaaatgaaatcaaa

SEQ ID NO: 18351 - RNA, 21 nt, synthetic construct
  source 1..21: mol_type = other RNA
tcaatgctatggtgactacct

SEQ ID NO: 18352 - RNA, 21 nt, synthetic construct
  source 1..21: mol_type = other RNA
tcaatgctgtgttcctctggt

SEQ ID NO: 18353 - RNA, 21 nt, synthetic construct
  source 1..21: mol_type = other RNA
tcaatgtataattatatgctc

SEQ ID NO: 18354 - RNA, 21 nt, synthetic construct
  source 1..21: mol_type = other RNA
tcaatgtcacaagcagcttgc

SEQ ID NO: 18355 - RNA, 21 nt, synthetic construct
  source 1..21: mol_type = other RNA
tcaatgtggaagaaggttaca

SEQ ID NO: 18356 - RNA, 21 nt, synthetic construct
  source 1..21: mol_type = other RNA
tcaattctagtttggtcctag

SEQ ID NO: 18357 - RNA, 21 nt, synthetic construct
  source 1..21: mol_type = other RNA
tcaatttcaagcaacgtggaa

SEQ ID NO: 18358 - RNA, 21 nt, synthetic construct
  source 1..21: mol_type = other RNA
tcacaaaatcccatatatagt

SEQ ID NO: 18359 - RNA, 21 nt, synthetic construct
  source 1..21: mol_type = other RNA
tcacaagcagcttgcccatca

SEQ ID NO: 18360 - RNA, 21 nt, synthetic construct
  source 1..21: mol_type = other RNA
tcaccatagcattgaatgtgt

SEQ ID NO: 18361 - RNA, 21 nt, synthetic construct
  source 1..21: mol_type = other RNA
tcacctaccaaccttaccttt

SEQ ID NO: 18362 - RNA, 21 nt, synthetic construct
  source 1..21: mol_type = other RNA
tcaccttatatgtcttaacca

SEQ ID NO: 18363 - RNA, 21 nt, synthetic construct
  source 1..21: mol_type = other RNA
tcactcccttttctccactgt

SEQ ID NO: 18364 - RNA, 21 nt, synthetic construct
  source 1..21: mol_type = other RNA
tcactgtttccaaaagaacta

SEQ ID NO: 18365 - RNA, 21 nt, synthetic construct
  source 1..21: mol_type = other RNA
tcagaaaaacttatgatgggc

SEQ ID NO: 18366 - RNA, 21 nt, synthetic construct
  source 1..21: mol_type = other RNA
tcagagagaaagtgttttttg

SEQ ID NO: 18367 - RNA, 21 nt, synthetic construct
  source 1..21: mol_type = other RNA
tcaggtggtgttacggctctc

SEQ ID NO: 18368 - RNA, 21 nt, synthetic construct
  source 1..21: mol_type = other RNA
tcataagtttttctgaagttt

SEQ ID NO: 18369 - RNA, 21 nt, synthetic construct
  source 1..21: mol_type = other RNA
tcatctaggaccaaactagaa

SEQ ID NO: 18370 - RNA, 21 nt, synthetic construct
  source 1..21: mol_type = other RNA
tcattaaagacatttcactcc

SEQ ID NO: 18371 - RNA, 21 nt, synthetic construct
  source 1..21: mol_type = other RNA
tcattaagccgtgttaacttg

SEQ ID NO: 18372 - RNA, 21 nt, synthetic construct
  source 1..21: mol_type = other RNA
tcattacttttttcccctcaa

SEQ ID NO: 18373 - RNA, 21 nt, synthetic construct
  source 1..21: mol_type = other RNA
tcatttagcattgatctaact

SEQ ID NO: 18374 - RNA, 21 nt, synthetic construct
  source 1..21: mol_type = other RNA
tccaaaaaacactttctctct

SEQ ID NO: 18375 - RNA, 21 nt, synthetic construct
  source 1..21: mol_type = other RNA
tccaaaagaactaaagtacag

SEQ ID NO: 18376 - RNA, 21 nt, synthetic construct
  source 1..21: mol_type = other RNA
tccacattgagttagatcaat

SEQ ID NO: 18377 - RNA, 21 nt, synthetic construct
  source 1..21: mol_type = other RNA
tccacgttgcttgaaattgaa

SEQ ID NO: 18378 - RNA, 21 nt, synthetic construct
  source 1..21: mol_type = other RNA
tccactccctcaggtggtgtt

SEQ ID NO: 18379 - RNA, 21 nt, synthetic construct
  source 1..21: mol_type = other RNA
tccactgtgttctgtgtctct

SEQ ID NO: 18380 - RNA, 21 nt, synthetic construct
  source 1..21: mol_type = other RNA
tccagaagaaaacagttccac

SEQ ID NO: 18381 - RNA, 21 nt, synthetic construct
  source 1..21: mol_type = other RNA
tccagaccagcatgggcaata

SEQ ID NO: 18382 - RNA, 21 nt, synthetic construct
  source 1..21: mol_type = other RNA
tccattccaaaaaacactttc

SEQ ID NO: 18383 - RNA, 21 nt, synthetic construct
  source 1..21: mol_type = other RNA
tccattgttccttcaacgagc

SEQ ID NO: 18384 - RNA, 21 nt, synthetic construct
  source 1..21: mol_type = other RNA
tcccatatatagtaagtgtca

SEQ ID NO: 18385 - RNA, 21 nt, synthetic construct
  source 1..21: mol_type = other RNA
tcccctcaactttaataataa

SEQ ID NO: 18386 - RNA, 21 nt, synthetic construct
  source 1..21: mol_type = other RNA
tccctcaggtggtgttacggc

SEQ ID NO: 18387 - RNA, 21 nt, synthetic construct
  source 1..21: mol_type = other RNA
tcccttttctccactgtgttc

SEQ ID NO: 18388 - RNA, 21 nt, synthetic construct
  source 1..21: mol_type = other RNA
tcctagatgaccacatatcca

SEQ ID NO: 18389 - RNA, 21 nt, synthetic construct
  source 1..21: mol_type = other RNA
tcctcattttttgtcactata

SEQ ID NO: 18390 - RNA, 21 nt, synthetic construct
  source 1..21: mol_type = other RNA
tcctctggtactctgtataaa

SEQ ID NO: 18391 - RNA, 21 nt, synthetic construct
  source 1..21: mol_type = other RNA
tcctctttttgttaaatgtat

SEQ ID NO: 18392 - RNA, 21 nt, synthetic construct
  source 1..21: mol_type = other RNA
tccttcaacgagcacatggta

SEQ ID NO: 18393 - RNA, 21 nt, synthetic construct
  source 1..21: mol_type = other RNA
tccttgtatattgtcacaaaa

SEQ ID NO: 18394 - RNA, 21 nt, synthetic construct
  source 1..21: mol_type = other RNA
tcgtgcaagttaacacggctt

SEQ ID NO: 18395 - RNA, 21 nt, synthetic construct
  source 1..21: mol_type = other RNA
tcgttgaaggaacaatggata

SEQ ID NO: 18396 - RNA, 21 nt, synthetic construct
  source 1..21: mol_type = other RNA
tctaactcaatgtggaagaag

SEQ ID NO: 18397 - RNA, 21 nt, synthetic construct
  source 1..21: mol_type = other RNA
tctaggaccaaactagaattg

SEQ ID NO: 18398 - RNA, 21 nt, synthetic construct
  source 1..21: mol_type = other RNA
tctaggctctttaccatgtgc

SEQ ID NO: 18399 - RNA, 21 nt, synthetic construct
  source 1..21: mol_type = other RNA
tctaggtctgcttccagaaga

SEQ ID NO: 18400 - RNA, 21 nt, synthetic construct
  source 1..21: mol_type = other RNA
tctagtttggtcctagatgac

SEQ ID NO: 18401 - RNA, 21 nt, synthetic construct
  source 1..21: mol_type = other RNA
tctatatataccaatatttgc

SEQ ID NO: 18402 - RNA, 21 nt, synthetic construct
  source 1..21: mol_type = other RNA
tctcaaactgtactttagttc

SEQ ID NO: 18403 - RNA, 21 nt, synthetic construct
  source 1..21: mol_type = other RNA
tctcaatgctgtgttcctctg

SEQ ID NO: 18404 - RNA, 21 nt, synthetic construct
  source 1..21: mol_type = other RNA
tctccactccctcaggtggtg

SEQ ID NO: 18405 - RNA, 21 nt, synthetic construct
  source 1..21: mol_type = other RNA
tctccactgtgttctgtgtct

SEQ ID NO: 18406 - RNA, 21 nt, synthetic construct
  source 1..21: mol_type = other RNA
tctcctctttttgttaaatgt

SEQ ID NO: 18407 - RNA, 21 nt, synthetic construct
  source 1..21: mol_type = other RNA
tctctctgaagcctttctcca

SEQ ID NO: 18408 - RNA, 21 nt, synthetic construct
  source 1..21: mol_type = other RNA
tctctgaagcctttctccact

SEQ ID NO: 18409 - RNA, 21 nt, synthetic construct
  source 1..21: mol_type = other RNA
tctctgtgttctaggctcttt

SEQ ID NO: 18410 - RNA, 21 nt, synthetic construct
  source 1..21: mol_type = other RNA
tctgaagcctttctccactcc

SEQ ID NO: 18411 - RNA, 21 nt, synthetic construct
  source 1..21: mol_type = other RNA
tctgaagtttgttagcttagt

SEQ ID NO: 18412 - RNA, 21 nt, synthetic construct
  source 1..21: mol_type = other RNA
tctgcttccagaagaaaacag

SEQ ID NO: 18413 - RNA, 21 nt, synthetic construct
  source 1..21: mol_type = other RNA
tctggaaatactgggctcaag

SEQ ID NO: 18414 - RNA, 21 nt, synthetic construct
  source 1..21: mol_type = other RNA
tctggaagcagacctagactt

SEQ ID NO: 18415 - RNA, 21 nt, synthetic construct
  source 1..21: mol_type = other RNA
tctgggcaaatattggtatat

SEQ ID NO: 18416 - RNA, 21 nt, synthetic construct
  source 1..21: mol_type = other RNA
tctggtactctgtataaatca

SEQ ID NO: 18417 - RNA, 21 nt, synthetic construct
  source 1..21: mol_type = other RNA
tctgtgtctctgtgttctagg

SEQ ID NO: 18418 - RNA, 21 nt, synthetic construct
  source 1..21: mol_type = other RNA
tctgtgttctaggctctttac

SEQ ID NO: 18419 - RNA, 21 nt, synthetic construct
  source 1..21: mol_type = other RNA
tcttaaataccttcaatgtca

SEQ ID NO: 18420 - RNA, 21 nt, synthetic construct
  source 1..21: mol_type = other RNA
tcttaaccatccttgtatatt

SEQ ID NO: 18421 - RNA, 21 nt, synthetic construct
  source 1..21: mol_type = other RNA
tcttaactctatatataccaa

SEQ ID NO: 18422 - RNA, 21 nt, synthetic construct
  source 1..21: mol_type = other RNA
tcttaatgtattgcccatgct

SEQ ID NO: 18423 - RNA, 21 nt, synthetic construct
  source 1..21: mol_type = other RNA
tcttccacattgagttagatc

SEQ ID NO: 18424 - RNA, 21 nt, synthetic construct
  source 1..21: mol_type = other RNA
tcttctggaagcagacctaga

SEQ ID NO: 18425 - RNA, 21 nt, synthetic construct
  source 1..21: mol_type = other RNA
tcttgattttcaatttcaagc

SEQ ID NO: 18426 - RNA, 21 nt, synthetic construct
  source 1..21: mol_type = other RNA
tctttaatgacacttactata

SEQ ID NO: 18427 - RNA, 21 nt, synthetic construct
  source 1..21: mol_type = other RNA
tctttaccatgtgctcgttga

SEQ ID NO: 18428 - RNA, 21 nt, synthetic construct
  source 1..21: mol_type = other RNA
tctttgatttcatttagcatt

SEQ ID NO: 18429 - RNA, 21 nt, synthetic construct
  source 1..21: mol_type = other RNA
tcttttggaaacagtgatcca

SEQ ID NO: 18430 - RNA, 21 nt, synthetic construct
  source 1..21: mol_type = other RNA
tgaaatcaaagaaatgagcaa

SEQ ID NO: 18431 - RNA, 21 nt, synthetic construct
  source 1..21: mol_type = other RNA
tgaaatgtctttaatgacact

SEQ ID NO: 18432 - RNA, 21 nt, synthetic construct
  source 1..21: mol_type = other RNA
tgaaattgtatttaactttgc

SEQ ID NO: 18433 - RNA, 21 nt, synthetic construct
  source 1..21: mol_type = other RNA
tgaacatagttaatcattaag

SEQ ID NO: 18434 - RNA, 21 nt, synthetic construct
  source 1..21: mol_type = other RNA
tgaagcctttctccactccct

SEQ ID NO: 18435 - RNA, 21 nt, synthetic construct
  source 1..21: mol_type = other RNA
tgaaggaacaatggatatgtg

SEQ ID NO: 18436 - RNA, 21 nt, synthetic construct
  source 1..21: mol_type = other RNA
tgaaggtatttaagattcaat

SEQ ID NO: 18437 - RNA, 21 nt, synthetic construct
  source 1..21: mol_type = other RNA
tgaagtttgttagcttagtaa

SEQ ID NO: 18438 - RNA, 21 nt, synthetic construct
  source 1..21: mol_type = other RNA
tgaatcttaaataccttcaat

SEQ ID NO: 18439 - RNA, 21 nt, synthetic construct
  source 1..21: mol_type = other RNA
tgaatgtgtagtttataatac

SEQ ID NO: 18440 - RNA, 21 nt, synthetic construct
  source 1..21: mol_type = other RNA
tgaattaagtatgcatttctc

SEQ ID NO: 18441 - RNA, 21 nt, synthetic construct
  source 1..21: mol_type = other RNA
tgacaaaaaatgaggagcata

SEQ ID NO: 18442 - RNA, 21 nt, synthetic construct
  source 1..21: mol_type = other RNA
tgacaatatacaaggatggtt

SEQ ID NO: 18443 - RNA, 21 nt, synthetic construct
  source 1..21: mol_type = other RNA
tgacacttactatatatggga

SEQ ID NO: 18444 - RNA, 21 nt, synthetic construct
  source 1..21: mol_type = other RNA
tgacattgaaggtatttaaga

SEQ ID NO: 18445 - RNA, 21 nt, synthetic construct
  source 1..21: mol_type = other RNA
tgaccacatatccattgttcc

SEQ ID NO: 18446 - RNA, 21 nt, synthetic construct
  source 1..21: mol_type = other RNA
tgactacctgtttttaaaagc

SEQ ID NO: 18447 - RNA, 21 nt, synthetic construct
  source 1..21: mol_type = other RNA
tgacttgtaaatctcttaaaa

SEQ ID NO: 18448 - RNA, 21 nt, synthetic construct
  source 1..21: mol_type = other RNA
tgagaaatgcatacttaattc

SEQ ID NO: 18449 - RNA, 21 nt, synthetic construct
  source 1..21: mol_type = other RNA
tgagagccgtaacaccacctg

SEQ ID NO: 18450 - RNA, 21 nt, synthetic construct
  source 1..21: mol_type = other RNA
tgagcaactaacttaataggt

SEQ ID NO: 18451 - RNA, 21 nt, synthetic construct
  source 1..21: mol_type = other RNA
tgagcccagtatttccagacc

SEQ ID NO: 18452 - RNA, 21 nt, synthetic construct
  source 1..21: mol_type = other RNA
tgaggagcatataattataca

SEQ ID NO: 18453 - RNA, 21 nt, synthetic construct
  source 1..21: mol_type = other RNA
tgagggagtggagaaaggctt

SEQ ID NO: 18454 - RNA, 21 nt, synthetic construct
  source 1..21: mol_type = other RNA
tgaggggaaaaaagtaatgaa

SEQ ID NO: 18455 - RNA, 21 nt, synthetic construct
  source 1..21: mol_type = other RNA
tgagttagatcaatgctaaat

SEQ ID NO: 18456 - RNA, 21 nt, synthetic construct
  source 1..21: mol_type = other RNA
tgatccattccaaaaaacact

SEQ ID NO: 18457 - RNA, 21 nt, synthetic construct
  source 1..21: mol_type = other RNA
tgatctaactcaatgtggaag

SEQ ID NO: 18458 - RNA, 21 nt, synthetic construct
  source 1..21: mol_type = other RNA
tgatgggcaagctgcttgtga

SEQ ID NO: 18459 - RNA, 21 nt, synthetic construct
  source 1..21: mol_type = other RNA
tgatgtcttaatgtattgccc

SEQ ID NO: 18460 - RNA, 21 nt, synthetic construct
  source 1..21: mol_type = other RNA
tgattaactatgttcacctac

SEQ ID NO: 18461 - RNA, 21 nt, synthetic construct
  source 1..21: mol_type = other RNA
tgatttatacagagtaccaga

SEQ ID NO: 18462 - RNA, 21 nt, synthetic construct
  source 1..21: mol_type = other RNA
tgatttcatttagcattgatc

SEQ ID NO: 18463 - RNA, 21 nt, synthetic construct
  source 1..21: mol_type = other RNA
tgattttaagagatttacaag

SEQ ID NO: 18464 - RNA, 21 nt, synthetic construct
  source 1..21: mol_type = other RNA
tgattttcaatttcaagcaac

SEQ ID NO: 18465 - RNA, 21 nt, synthetic construct
  source 1..21: mol_type = other RNA
tgcaagttaacacggcttaat

SEQ ID NO: 18466 - RNA, 21 nt, synthetic construct
  source 1..21: mol_type = other RNA
tgcacgaatgtaaccttcttc

SEQ ID NO: 18467 - RNA, 21 nt, synthetic construct
  source 1..21: mol_type = other RNA
tgcatacttaattcattactt

SEQ ID NO: 18468 - RNA, 21 nt, synthetic construct
  source 1..21: mol_type = other RNA
tgcatcaccttatatgtctta

SEQ ID NO: 18469 - RNA, 21 nt, synthetic construct
  source 1..21: mol_type = other RNA
tgcatttctcaaactgtactt

SEQ ID NO: 18470 - RNA, 21 nt, synthetic construct
  source 1..21: mol_type = other RNA
tgcccagaaaaggtaaggttg

SEQ ID NO: 18471 - RNA, 21 nt, synthetic construct
  source 1..21: mol_type = other RNA
tgcccatcataagtttttctg

SEQ ID NO: 18472 - RNA, 21 nt, synthetic construct
  source 1..21: mol_type = other RNA
tgcccatgctggtctggaaat

SEQ ID NO: 18473 - RNA, 21 nt, synthetic construct
  source 1..21: mol_type = other RNA
tgctaaatgaaatcaaagaaa

SEQ ID NO: 18474 - RNA, 21 nt, synthetic construct
  source 1..21: mol_type = other RNA
tgctatggtgactacctgttt

SEQ ID NO: 18475 - RNA, 21 nt, synthetic construct
  source 1..21: mol_type = other RNA
tgctcatttctttgatttcat

SEQ ID NO: 18476 - RNA, 21 nt, synthetic construct
  source 1..21: mol_type = other RNA
tgctcctcattttttgtcact

SEQ ID NO: 18477 - RNA, 21 nt, synthetic construct
  source 1..21: mol_type = other RNA
tgctcgttgaaggaacaatgg

SEQ ID NO: 18478 - RNA, 21 nt, synthetic construct
  source 1..21: mol_type = other RNA
tgctggtctggaaatactggg

SEQ ID NO: 18479 - RNA, 21 nt, synthetic construct
  source 1..21: mol_type = other RNA
tgctgtattataaactacaca

SEQ ID NO: 18480 - RNA, 21 nt, synthetic construct
  source 1..21: mol_type = other RNA
tgctgtgttcctctggtactc

SEQ ID NO: 18481 - RNA, 21 nt, synthetic construct
  source 1..21: mol_type = other RNA
tgcttccagaagaaaacagtt

SEQ ID NO: 18482 - RNA, 21 nt, synthetic construct
  source 1..21: mol_type = other RNA
tgcttgagcccagtatttcca

SEQ ID NO: 18483 - RNA, 21 nt, synthetic construct
  source 1..21: mol_type = other RNA
tgcttgtgacattgaaggtat

SEQ ID NO: 18484 - RNA, 21 nt, synthetic construct
  source 1..21: mol_type = other RNA
tggaaacagtgatccattcca

SEQ ID NO: 18485 - RNA, 21 nt, synthetic construct
  source 1..21: mol_type = other RNA
tggaaatactgggctcaagca

SEQ ID NO: 18486 - RNA, 21 nt, synthetic construct
  source 1..21: mol_type = other RNA
tggaactgttttcttctggaa

SEQ ID NO: 18487 - RNA, 21 nt, synthetic construct
  source 1..21: mol_type = other RNA
tggaagaaggttacattcgtg

SEQ ID NO: 18488 - RNA, 21 nt, synthetic construct
  source 1..21: mol_type = other RNA
tggaagcagacctagacttct

SEQ ID NO: 18489 - RNA, 21 nt, synthetic construct
  source 1..21: mol_type = other RNA
tggaatggatcactgtttcca

SEQ ID NO: 18490 - RNA, 21 nt, synthetic construct
  source 1..21: mol_type = other RNA
tggagaaaagggagtgaaatg

SEQ ID NO: 18491 - RNA, 21 nt, synthetic construct
  source 1..21: mol_type = other RNA
tggagaaaggcttcagagaga

SEQ ID NO: 18492 - RNA, 21 nt, synthetic construct
  source 1..21: mol_type = other RNA
tggatatgtggtcatctagga

SEQ ID NO: 18493 - RNA, 21 nt, synthetic construct
  source 1..21: mol_type = other RNA
tggatcactgtttccaaaaga

SEQ ID NO: 18494 - RNA, 21 nt, synthetic construct
  source 1..21: mol_type = other RNA
tgggaggccaaggtaaaagaa

SEQ ID NO: 18495 - RNA, 21 nt, synthetic construct
  source 1..21: mol_type = other RNA
tgggattttgtgacaatatac

SEQ ID NO: 18496 - RNA, 21 nt, synthetic construct
  source 1..21: mol_type = other RNA
tgggcaaatattggtatatat

SEQ ID NO: 18497 - RNA, 21 nt, synthetic construct
  source 1..21: mol_type = other RNA
tgggcaagctgcttgtgacat

SEQ ID NO: 18498 - RNA, 21 nt, synthetic construct
  source 1..21: mol_type = other RNA
tgggcaatacattaagacatc

SEQ ID NO: 18499 - RNA, 21 nt, synthetic construct
  source 1..21: mol_type = other RNA
tgggctcaagcaattctttta

SEQ ID NO: 18500 - RNA, 21 nt, synthetic construct
  source 1..21: mol_type = other RNA
tggtaaagagcctagaacaca

SEQ ID NO: 18501 - RNA, 21 nt, synthetic construct
  source 1..21: mol_type = other RNA
tggtactctgtataaatcaat

SEQ ID NO: 18502 - RNA, 21 nt, synthetic construct
  source 1..21: mol_type = other RNA
tggtaggtgaacatagttaat

SEQ ID NO: 18503 - RNA, 21 nt, synthetic construct
  source 1..21: mol_type = other RNA
tggtatatatagagttaagaa

SEQ ID NO: 18504 - RNA, 21 nt, synthetic construct
  source 1..21: mol_type = other RNA
tggtcatctaggaccaaacta

SEQ ID NO: 18505 - RNA, 21 nt, synthetic construct
  source 1..21: mol_type = other RNA
tggtcctagatgaccacatat

SEQ ID NO: 18506 - RNA, 21 nt, synthetic construct
  source 1..21: mol_type = other RNA
tggtctggaaatactgggctc

SEQ ID NO: 18507 - RNA, 21 nt, synthetic construct
  source 1..21: mol_type = other RNA
tggtgactacctgtttttaaa

SEQ ID NO: 18508 - RNA, 21 nt, synthetic construct
  source 1..21: mol_type = other RNA
tggtgttacggctctcaatgc

SEQ ID NO: 18509 - RNA, 21 nt, synthetic construct
  source 1..21: mol_type = other RNA
tggttaagacatataaggtga

SEQ ID NO: 18510 - RNA, 21 nt, synthetic construct
  source 1..21: mol_type = other RNA
tgtaaccttcttccacattga

SEQ ID NO: 18511 - RNA, 21 nt, synthetic construct
  source 1..21: mol_type = other RNA
tgtactttagttcttttggaa

SEQ ID NO: 18512 - RNA, 21 nt, synthetic construct
  source 1..21: mol_type = other RNA
tgtagtttataatacagcaaa

SEQ ID NO: 18513 - RNA, 21 nt, synthetic construct
  source 1..21: mol_type = other RNA
tgtataattatatgctcctca

SEQ ID NO: 18514 - RNA, 21 nt, synthetic construct
  source 1..21: mol_type = other RNA
tgtatattgtcacaaaatccc

SEQ ID NO: 18515 - RNA, 21 nt, synthetic construct
  source 1..21: mol_type = other RNA
tgtattataaactacacattc

SEQ ID NO: 18516 - RNA, 21 nt, synthetic construct
  source 1..21: mol_type = other RNA
tgtattgcccatgctggtctg

SEQ ID NO: 18517 - RNA, 21 nt, synthetic construct
  source 1..21: mol_type = other RNA
tgtatttaactttgctgtatt

SEQ ID NO: 18518 - RNA, 21 nt, synthetic construct
  source 1..21: mol_type = other RNA
tgtcacaaaatcccatatata

SEQ ID NO: 18519 - RNA, 21 nt, synthetic construct
  source 1..21: mol_type = other RNA
tgtcacaagcagcttgcccat

SEQ ID NO: 18520 - RNA, 21 nt, synthetic construct
  source 1..21: mol_type = other RNA
tgtcattaaagacatttcact

SEQ ID NO: 18521 - RNA, 21 nt, synthetic construct
  source 1..21: mol_type = other RNA
tgtctctgtgttctaggctct

SEQ ID NO: 18522 - RNA, 21 nt, synthetic construct
  source 1..21: mol_type = other RNA
tgtcttaaccatccttgtata

SEQ ID NO: 18523 - RNA, 21 nt, synthetic construct
  source 1..21: mol_type = other RNA
tgtcttaatgtattgcccatg

SEQ ID NO: 18524 - RNA, 21 nt, synthetic construct
  source 1..21: mol_type = other RNA
tgtctttaatgacacttacta

SEQ ID NO: 18525 - RNA, 21 nt, synthetic construct
  source 1..21: mol_type = other RNA
tgtgacaatatacaaggatgg

SEQ ID NO: 18526 - RNA, 21 nt, synthetic construct
  source 1..21: mol_type = other RNA
tgtgacattgaaggtatttaa

SEQ ID NO: 18527 - RNA, 21 nt, synthetic construct
  source 1..21: mol_type = other RNA
tgtgctcgttgaaggaacaat

SEQ ID NO: 18528 - RNA, 21 nt, synthetic construct
  source 1..21: mol_type = other RNA
tgtggaagaaggttacattcg

SEQ ID NO: 18529 - RNA, 21 nt, synthetic construct
  source 1..21: mol_type = other RNA
tgtggtcatctaggaccaaac

SEQ ID NO: 18530 - RNA, 21 nt, synthetic construct
  source 1..21: mol_type = other RNA
tgtgtagtttataatacagca

SEQ ID NO: 18531 - RNA, 21 nt, synthetic construct
  source 1..21: mol_type = other RNA
tgtgtctctgtgttctaggct

SEQ ID NO: 18532 - RNA, 21 nt, synthetic construct
  source 1..21: mol_type = other RNA
tgtgttcctctggtactctgt

SEQ ID NO: 18533 - RNA, 21 nt, synthetic construct
  source 1..21: mol_type = other RNA
tgtgttctaggctctttacca

SEQ ID NO: 18534 - RNA, 21 nt, synthetic construct
  source 1..21: mol_type = other RNA
tgtgttctgtgtctctgtgtt

SEQ ID NO: 18535 - RNA, 21 nt, synthetic construct
  source 1..21: mol_type = other RNA
tgttaacttgcacgaatgtaa

SEQ ID NO: 18536 - RNA, 21 nt, synthetic construct
  source 1..21: mol_type = other RNA
tgttacggctctcaatgctgt

SEQ ID NO: 18537 - RNA, 21 nt, synthetic construct
  source 1..21: mol_type = other RNA
tgttactaagctaacaaactt

SEQ ID NO: 18538 - RNA, 21 nt, synthetic construct
  source 1..21: mol_type = other RNA
tgttagcttagtaacaatttt

SEQ ID NO: 18539 - RNA, 21 nt, synthetic construct
  source 1..21: mol_type = other RNA
tgttattaatctcctcttttt

SEQ ID NO: 18540 - RNA, 21 nt, synthetic construct
  source 1..21: mol_type = other RNA
tgttcacctaccaaccttacc

SEQ ID NO: 18541 - RNA, 21 nt, synthetic construct
  source 1..21: mol_type = other RNA
tgttcctctggtactctgtat

SEQ ID NO: 18542 - RNA, 21 nt, synthetic construct
  source 1..21: mol_type = other RNA
tgttccttcaacgagcacatg

SEQ ID NO: 18543 - RNA, 21 nt, synthetic construct
  source 1..21: mol_type = other RNA
tgttctaggctctttaccatg

SEQ ID NO: 18544 - RNA, 21 nt, synthetic construct
  source 1..21: mol_type = other RNA
tgttctgtgtctctgtgttct

SEQ ID NO: 18545 - RNA, 21 nt, synthetic construct
  source 1..21: mol_type = other RNA
tgtttccaaaagaactaaagt

SEQ ID NO: 18546 - RNA, 21 nt, synthetic construct
  source 1..21: mol_type = other RNA
tgttttcttctggaagcagac

SEQ ID NO: 18547 - RNA, 21 nt, synthetic construct
  source 1..21: mol_type = other RNA
tgttttttggaatggatcact

SEQ ID NO: 18548 - RNA, 21 nt, synthetic construct
  source 1..21: mol_type = other RNA
ttaaaaacaggtagtcaccat

SEQ ID NO: 18549 - RNA, 21 nt, synthetic construct
  source 1..21: mol_type = other RNA
ttaaagacatttcactccctt

SEQ ID NO: 18550 - RNA, 21 nt, synthetic construct
  source 1..21: mol_type = other RNA
ttaaagatgatgtcttaatgt

SEQ ID NO: 18551 - RNA, 21 nt, synthetic construct
  source 1..21: mol_type = other RNA
ttaaagttgaggggaaaaaag

SEQ ID NO: 18552 - RNA, 21 nt, synthetic construct
  source 1..21: mol_type = other RNA
ttaaataccttcaatgtcaca

SEQ ID NO: 18553 - RNA, 21 nt, synthetic construct
  source 1..21: mol_type = other RNA
ttaacaaaaagaggagattaa

SEQ ID NO: 18554 - RNA, 21 nt, synthetic construct
  source 1..21: mol_type = other RNA
ttaacacggcttaatgattaa

SEQ ID NO: 18555 - RNA, 21 nt, synthetic construct
  source 1..21: mol_type = other RNA
ttaaccatccttgtatattgt

SEQ ID NO: 18556 - RNA, 21 nt, synthetic construct
  source 1..21: mol_type = other RNA
ttaactatgttcacctaccaa

SEQ ID NO: 18557 - RNA, 21 nt, synthetic construct
  source 1..21: mol_type = other RNA
ttaacttgcacgaatgtaacc

SEQ ID NO: 18558 - RNA, 21 nt, synthetic construct
  source 1..21: mol_type = other RNA
ttaagaagtctaggtctgctt

SEQ ID NO: 18559 - RNA, 21 nt, synthetic construct
  source 1..21: mol_type = other RNA
ttaagacatataaggtgatgc

SEQ ID NO: 18560 - RNA, 21 nt, synthetic construct
  source 1..21: mol_type = other RNA
ttaagagatttacaagtcaaa

SEQ ID NO: 18561 - RNA, 21 nt, synthetic construct
  source 1..21: mol_type = other RNA
ttaagattcaattctagtttg

SEQ ID NO: 18562 - RNA, 21 nt, synthetic construct
  source 1..21: mol_type = other RNA
ttaagccgtgttaacttgcac

SEQ ID NO: 18563 - RNA, 21 nt, synthetic construct
  source 1..21: mol_type = other RNA
ttaagtatgcatttctcaaac

SEQ ID NO: 18564 - RNA, 21 nt, synthetic construct
  source 1..21: mol_type = other RNA
ttaagttagttgctcatttct

SEQ ID NO: 18565 - RNA, 21 nt, synthetic construct
  source 1..21: mol_type = other RNA
ttaatcattaagccgtgttaa

SEQ ID NO: 18566 - RNA, 21 nt, synthetic construct
  source 1..21: mol_type = other RNA
ttaatctcctctttttgttaa

SEQ ID NO: 18567 - RNA, 21 nt, synthetic construct
  source 1..21: mol_type = other RNA
ttaatgattaactatgttcac

SEQ ID NO: 18568 - RNA, 21 nt, synthetic construct
  source 1..21: mol_type = other RNA
ttaatgtattgcccatgctgg

SEQ ID NO: 18569 - RNA, 21 nt, synthetic construct
  source 1..21: mol_type = other RNA
ttaattcattacttttttccc

SEQ ID NO: 18570 - RNA, 21 nt, synthetic construct
  source 1..21: mol_type = other RNA
ttacattcgtgcaagttaaca

SEQ ID NO: 18571 - RNA, 21 nt, synthetic construct
  source 1..21: mol_type = other RNA
ttaccatgtgctcgttgaagg

SEQ ID NO: 18572 - RNA, 21 nt, synthetic construct
  source 1..21: mol_type = other RNA
ttacccaacaaaaaagtttat

SEQ ID NO: 18573 - RNA, 21 nt, synthetic construct
  source 1..21: mol_type = other RNA
ttacctattaagttagttgct

SEQ ID NO: 18574 - RNA, 21 nt, synthetic construct
  source 1..21: mol_type = other RNA
ttaccttttctgggcaaatat

SEQ ID NO: 18575 - RNA, 21 nt, synthetic construct
  source 1..21: mol_type = other RNA
ttacggctctcaatgctgtgt

SEQ ID NO: 18576 - RNA, 21 nt, synthetic construct
  source 1..21: mol_type = other RNA
ttactaagctaacaaacttca

SEQ ID NO: 18577 - RNA, 21 nt, synthetic construct
  source 1..21: mol_type = other RNA
ttactatatatgggattttgt

SEQ ID NO: 18578 - RNA, 21 nt, synthetic construct
  source 1..21: mol_type = other RNA
ttacttttttcccctcaactt

SEQ ID NO: 18579 - RNA, 21 nt, synthetic construct
  source 1..21: mol_type = other RNA
ttagatcaatgctaaatgaaa

SEQ ID NO: 18580 - RNA, 21 nt, synthetic construct
  source 1..21: mol_type = other RNA
ttagcattgatctaactcaat

SEQ ID NO: 18581 - RNA, 21 nt, synthetic construct
  source 1..21: mol_type = other RNA
ttagcttagtaacaattttga

SEQ ID NO: 18582 - RNA, 21 nt, synthetic construct
  source 1..21: mol_type = other RNA
ttagcttttaaaaacaggtag

SEQ ID NO: 18583 - RNA, 21 nt, synthetic construct
  source 1..21: mol_type = other RNA
ttagttcttttggaaacagtg

SEQ ID NO: 18584 - RNA, 21 nt, synthetic construct
  source 1..21: mol_type = other RNA
ttagttgctcatttctttgat

SEQ ID NO: 18585 - RNA, 21 nt, synthetic construct
  source 1..21: mol_type = other RNA
ttataaactacacattcaatg

SEQ ID NO: 18586 - RNA, 21 nt, synthetic construct
  source 1..21: mol_type = other RNA
ttatacagagtaccagaggaa

SEQ ID NO: 18587 - RNA, 21 nt, synthetic construct
  source 1..21: mol_type = other RNA
ttatagtgacaaaaaatgagg

SEQ ID NO: 18588 - RNA, 21 nt, synthetic construct
  source 1..21: mol_type = other RNA
ttatatgctcctcattttttg

SEQ ID NO: 18589 - RNA, 21 nt, synthetic construct
  source 1..21: mol_type = other RNA
ttatatgtcttaaccatcctt

SEQ ID NO: 18590 - RNA, 21 nt, synthetic construct
  source 1..21: mol_type = other RNA
ttatcaaaattgttactaagc

SEQ ID NO: 18591 - RNA, 21 nt, synthetic construct
  source 1..21: mol_type = other RNA
ttatgatgggcaagctgcttg

SEQ ID NO: 18592 - RNA, 21 nt, synthetic construct
  source 1..21: mol_type = other RNA
ttattaaagttgaggggaaaa

SEQ ID NO: 18593 - RNA, 21 nt, synthetic construct
  source 1..21: mol_type = other RNA
ttattaatctcctctttttgt

SEQ ID NO: 18594 - RNA, 21 nt, synthetic construct
  source 1..21: mol_type = other RNA
ttattattaaagttgagggga

SEQ ID NO: 18595 - RNA, 21 nt, synthetic construct
  source 1..21: mol_type = other RNA
ttcaacgagcacatggtaaag

SEQ ID NO: 18596 - RNA, 21 nt, synthetic construct
  source 1..21: mol_type = other RNA
ttcaagcaacgtggaactgtt

SEQ ID NO: 18597 - RNA, 21 nt, synthetic construct
  source 1..21: mol_type = other RNA
ttcaatgctatggtgactacc

SEQ ID NO: 18598 - RNA, 21 nt, synthetic construct
  source 1..21: mol_type = other RNA
ttcaatgtcacaagcagcttg

SEQ ID NO: 18599 - RNA, 21 nt, synthetic construct
  source 1..21: mol_type = other RNA
ttcaattctagtttggtccta

SEQ ID NO: 18600 - RNA, 21 nt, synthetic construct
  source 1..21: mol_type = other RNA
ttcaatttcaagcaacgtgga

SEQ ID NO: 18601 - RNA, 21 nt, synthetic construct
  source 1..21: mol_type = other RNA
ttcacctaccaaccttacctt

SEQ ID NO: 18602 - RNA, 21 nt, synthetic construct
  source 1..21: mol_type = other RNA
ttcactcccttttctccactg

SEQ ID NO: 18603 - RNA, 21 nt, synthetic construct
  source 1..21: mol_type = other RNA
ttcagaaaaacttatgatggg

SEQ ID NO: 18604 - RNA, 21 nt, synthetic construct
  source 1..21: mol_type = other RNA
ttcagagagaaagtgtttttt

SEQ ID NO: 18605 - RNA, 21 nt, synthetic construct
  source 1..21: mol_type = other RNA
ttcattacttttttcccctca

SEQ ID NO: 18606 - RNA, 21 nt, synthetic construct
  source 1..21: mol_type = other RNA
ttcatttagcattgatctaac

SEQ ID NO: 18607 - RNA, 21 nt, synthetic construct
  source 1..21: mol_type = other RNA
ttccaaaaaacactttctctc

SEQ ID NO: 18608 - RNA, 21 nt, synthetic construct
  source 1..21: mol_type = other RNA
ttccaaaagaactaaagtaca

SEQ ID NO: 18609 - RNA, 21 nt, synthetic construct
  source 1..21: mol_type = other RNA
ttccacattgagttagatcaa

SEQ ID NO: 18610 - RNA, 21 nt, synthetic construct
  source 1..21: mol_type = other RNA
ttccacgttgcttgaaattga

SEQ ID NO: 18611 - RNA, 21 nt, synthetic construct
  source 1..21: mol_type = other RNA
ttccagaagaaaacagttcca

SEQ ID NO: 18612 - RNA, 21 nt, synthetic construct
  source 1..21: mol_type = other RNA
ttccagaccagcatgggcaat

SEQ ID NO: 18613 - RNA, 21 nt, synthetic construct
  source 1..21: mol_type = other RNA
ttcccctcaactttaataata

SEQ ID NO: 18614 - RNA, 21 nt, synthetic construct
  source 1..21: mol_type = other RNA
ttcctctggtactctgtataa

SEQ ID NO: 18615 - RNA, 21 nt, synthetic construct
  source 1..21: mol_type = other RNA
ttccttcaacgagcacatggt

SEQ ID NO: 18616 - RNA, 21 nt, synthetic construct
  source 1..21: mol_type = other RNA
ttcgtgcaagttaacacggct

SEQ ID NO: 18617 - RNA, 21 nt, synthetic construct
  source 1..21: mol_type = other RNA
ttctaggctctttaccatgtg

SEQ ID NO: 18618 - RNA, 21 nt, synthetic construct
  source 1..21: mol_type = other RNA
ttctagtttggtcctagatga

SEQ ID NO: 18619 - RNA, 21 nt, synthetic construct
  source 1..21: mol_type = other RNA
ttctcaaactgtactttagtt

SEQ ID NO: 18620 - RNA, 21 nt, synthetic construct
  source 1..21: mol_type = other RNA
ttctccactccctcaggtggt

SEQ ID NO: 18621 - RNA, 21 nt, synthetic construct
  source 1..21: mol_type = other RNA
ttctccactgtgttctgtgtc

SEQ ID NO: 18622 - RNA, 21 nt, synthetic construct
  source 1..21: mol_type = other RNA
ttctctctgaagcctttctcc

SEQ ID NO: 18623 - RNA, 21 nt, synthetic construct
  source 1..21: mol_type = other RNA
ttctgaagtttgttagcttag

SEQ ID NO: 18624 - RNA, 21 nt, synthetic construct
  source 1..21: mol_type = other RNA
ttctggaagcagacctagact

SEQ ID NO: 18625 - RNA, 21 nt, synthetic construct
  source 1..21: mol_type = other RNA
ttctgggcaaatattggtata

SEQ ID NO: 18626 - RNA, 21 nt, synthetic construct
  source 1..21: mol_type = other RNA
ttctgtgtctctgtgttctag

SEQ ID NO: 18627 - RNA, 21 nt, synthetic construct
  source 1..21: mol_type = other RNA
ttcttaactctatatatacca

SEQ ID NO: 18628 - RNA, 21 nt, synthetic construct
  source 1..21: mol_type = other RNA
ttcttccacattgagttagat

SEQ ID NO: 18629 - RNA, 21 nt, synthetic construct
  source 1..21: mol_type = other RNA
ttcttctggaagcagacctag

SEQ ID NO: 18630 - RNA, 21 nt, synthetic construct
  source 1..21: mol_type = other RNA
ttctttgatttcatttagcat

SEQ ID NO: 18631 - RNA, 21 nt, synthetic construct
  source 1..21: mol_type = other RNA
ttcttttggaaacagtgatcc

SEQ ID NO: 18632 - RNA, 21 nt, synthetic construct
  source 1..21: mol_type = other RNA
ttgaaggaacaatggatatgt

SEQ ID NO: 18633 - RNA, 21 nt, synthetic construct
  source 1..21: mol_type = other RNA
ttgaaggtatttaagattcaa

SEQ ID NO: 18634 - RNA, 21 nt, synthetic construct
  source 1..21: mol_type = other RNA
ttgaatcttaaataccttcaa

SEQ ID NO: 18635 - RNA, 21 nt, synthetic construct
  source 1..21: mol_type = other RNA
ttgacttgtaaatctcttaaa

SEQ ID NO: 18636 - RNA, 21 nt, synthetic construct
  source 1..21: mol_type = other RNA
ttgagaaatgcatacttaatt

SEQ ID NO: 18637 - RNA, 21 nt, synthetic construct
  source 1..21: mol_type = other RNA
ttgagagccgtaacaccacct

SEQ ID NO: 18638 - RNA, 21 nt, synthetic construct
  source 1..21: mol_type = other RNA
ttgagcccagtatttccagac

SEQ ID NO: 18639 - RNA, 21 nt, synthetic construct
  source 1..21: mol_type = other RNA
ttgaggggaaaaaagtaatga

SEQ ID NO: 18640 - RNA, 21 nt, synthetic construct
  source 1..21: mol_type = other RNA
ttgagttagatcaatgctaaa

SEQ ID NO: 18641 - RNA, 21 nt, synthetic construct
  source 1..21: mol_type = other RNA
ttgatctaactcaatgtggaa

SEQ ID NO: 18642 - RNA, 21 nt, synthetic construct
  source 1..21: mol_type = other RNA
ttgatttatacagagtaccag

SEQ ID NO: 18643 - RNA, 21 nt, synthetic construct
  source 1..21: mol_type = other RNA
ttgatttcatttagcattgat

SEQ ID NO: 18644 - RNA, 21 nt, synthetic construct
  source 1..21: mol_type = other RNA
ttgattttcaatttcaagcaa

SEQ ID NO: 18645 - RNA, 21 nt, synthetic construct
  source 1..21: mol_type = other RNA
ttgcacgaatgtaaccttctt

SEQ ID NO: 18646 - RNA, 21 nt, synthetic construct
  source 1..21: mol_type = other RNA
ttgcatcaccttatatgtctt

SEQ ID NO: 18647 - RNA, 21 nt, synthetic construct
  source 1..21: mol_type = other RNA
ttgcccagaaaaggtaaggtt

SEQ ID NO: 18648 - RNA, 21 nt, synthetic construct
  source 1..21: mol_type = other RNA
ttgcccatcataagtttttct

SEQ ID NO: 18649 - RNA, 21 nt, synthetic construct
  source 1..21: mol_type = other RNA
ttgcccatgctggtctggaaa

SEQ ID NO: 18650 - RNA, 21 nt, synthetic construct
  source 1..21: mol_type = other RNA
ttgctcatttctttgatttca

SEQ ID NO: 18651 - RNA, 21 nt, synthetic construct
  source 1..21: mol_type = other RNA
ttgctgtattataaactacac

SEQ ID NO: 18652 - RNA, 21 nt, synthetic construct
  source 1..21: mol_type = other RNA
ttgcttgagcccagtatttcc

SEQ ID NO: 18653 - RNA, 21 nt, synthetic construct
  source 1..21: mol_type = other RNA
ttggaaacagtgatccattcc

SEQ ID NO: 18654 - RNA, 21 nt, synthetic construct
  source 1..21: mol_type = other RNA
ttggaatggatcactgtttcc

SEQ ID NO: 18655 - RNA, 21 nt, synthetic construct
  source 1..21: mol_type = other RNA
ttggtaggtgaacatagttaa

SEQ ID NO: 18656 - RNA, 21 nt, synthetic construct
  source 1..21: mol_type = other RNA
ttggtatatatagagttaaga

SEQ ID NO: 18657 - RNA, 21 nt, synthetic construct
  source 1..21: mol_type = other RNA
ttggtcctagatgaccacata

SEQ ID NO: 18658 - RNA, 21 nt, synthetic construct
  source 1..21: mol_type = other RNA
ttgtatattgtcacaaaatcc

SEQ ID NO: 18659 - RNA, 21 nt, synthetic construct
  source 1..21: mol_type = other RNA
ttgtatttaactttgctgtat

SEQ ID NO: 18660 - RNA, 21 nt, synthetic construct
  source 1..21: mol_type = other RNA
ttgtcacaaaatcccatatat

SEQ ID NO: 18661 - RNA, 21 nt, synthetic construct
  source 1..21: mol_type = other RNA
ttgtgacaatatacaaggatg

SEQ ID NO: 18662 - RNA, 21 nt, synthetic construct
  source 1..21: mol_type = other RNA
ttgtgacattgaaggtattta

SEQ ID NO: 18663 - RNA, 21 nt, synthetic construct
  source 1..21: mol_type = other RNA
ttgttactaagctaacaaact

SEQ ID NO: 18664 - RNA, 21 nt, synthetic construct
  source 1..21: mol_type = other RNA
ttgttagcttagtaacaattt

SEQ ID NO: 18665 - RNA, 21 nt, synthetic construct
  source 1..21: mol_type = other RNA
ttgttccttcaacgagcacat

SEQ ID NO: 18666 - RNA, 21 nt, synthetic construct
  source 1..21: mol_type = other RNA
tttaaaaacaggtagtcacca

SEQ ID NO: 18667 - RNA, 21 nt, synthetic construct
  source 1..21: mol_type = other RNA
tttaaagatgatgtcttaatg

SEQ ID NO: 18668 - RNA, 21 nt, synthetic construct
  source 1..21: mol_type = other RNA
tttaacaaaaagaggagatta

SEQ ID NO: 18669 - RNA, 21 nt, synthetic construct
  source 1..21: mol_type = other RNA
tttaagagatttacaagtcaa

SEQ ID NO: 18670 - RNA, 21 nt, synthetic construct
  source 1..21: mol_type = other RNA
tttaccatgtgctcgttgaag

SEQ ID NO: 18671 - RNA, 21 nt, synthetic construct
  source 1..21: mol_type = other RNA
tttacccaacaaaaaagttta

SEQ ID NO: 18672 - RNA, 21 nt, synthetic construct
  source 1..21: mol_type = other RNA
tttagcattgatctaactcaa

SEQ ID NO: 18673 - RNA, 21 nt, synthetic construct
  source 1..21: mol_type = other RNA
tttagttcttttggaaacagt

SEQ ID NO: 18674 - RNA, 21 nt, synthetic construct
  source 1..21: mol_type = other RNA
tttatacagagtaccagagga

SEQ ID NO: 18675 - RNA, 21 nt, synthetic construct
  source 1..21: mol_type = other RNA
tttattattaaagttgagggg

SEQ ID NO: 18676 - RNA, 21 nt, synthetic construct
  source 1..21: mol_type = other RNA
tttcaagcaacgtggaactgt

SEQ ID NO: 18677 - RNA, 21 nt, synthetic construct
  source 1..21: mol_type = other RNA
tttcaatttcaagcaacgtgg

SEQ ID NO: 18678 - RNA, 21 nt, synthetic construct
  source 1..21: mol_type = other RNA
tttcactcccttttctccact

SEQ ID NO: 18679 - RNA, 21 nt, synthetic construct
  source 1..21: mol_type = other RNA
tttcatttagcattgatctaa

SEQ ID NO: 18680 - RNA, 21 nt, synthetic construct
  source 1..21: mol_type = other RNA
tttccaaaagaactaaagtac

SEQ ID NO: 18681 - RNA, 21 nt, synthetic construct
  source 1..21: mol_type = other RNA
tttccagaccagcatgggcaa

SEQ ID NO: 18682 - RNA, 21 nt, synthetic construct
  source 1..21: mol_type = other RNA
tttcccctcaactttaataat

SEQ ID NO: 18683 - RNA, 21 nt, synthetic construct
  source 1..21: mol_type = other RNA
tttctcaaactgtactttagt

SEQ ID NO: 18684 - RNA, 21 nt, synthetic construct
  source 1..21: mol_type = other RNA
tttctccactccctcaggtgg

SEQ ID NO: 18685 - RNA, 21 nt, synthetic construct
  source 1..21: mol_type = other RNA
tttctccactgtgttctgtgt

SEQ ID NO: 18686 - RNA, 21 nt, synthetic construct
  source 1..21: mol_type = other RNA
tttctctctgaagcctttctc

SEQ ID NO: 18687 - RNA, 21 nt, synthetic construct
  source 1..21: mol_type = other RNA
tttctgaagtttgttagctta

SEQ ID NO: 18688 - RNA, 21 nt, synthetic construct
  source 1..21: mol_type = other RNA
tttctgggcaaatattggtat

SEQ ID NO: 18689 - RNA, 21 nt, synthetic construct
  source 1..21: mol_type = other RNA
tttcttctggaagcagaccta

SEQ ID NO: 18690 - RNA, 21 nt, synthetic construct
  source 1..21: mol_type = other RNA
tttctttgatttcatttagca

SEQ ID NO: 18691 - RNA, 21 nt, synthetic construct
  source 1..21: mol_type = other RNA
tttgacttgtaaatctcttaa

SEQ ID NO: 18692 - RNA, 21 nt, synthetic construct
  source 1..21: mol_type = other RNA
tttgagaaatgcatacttaat

SEQ ID NO: 18693 - RNA, 21 nt, synthetic construct
  source 1..21: mol_type = other RNA
tttgatttcatttagcattga

SEQ ID NO: 18694 - RNA, 21 nt, synthetic construct
  source 1..21: mol_type = other RNA
tttgcatcaccttatatgtct

SEQ ID NO: 18695 - RNA, 21 nt, synthetic construct
  source 1..21: mol_type = other RNA
tttgcccagaaaaggtaaggt

SEQ ID NO: 18696 - RNA, 21 nt, synthetic construct
  source 1..21: mol_type = other RNA
tttgctgtattataaactaca

SEQ ID NO: 18697 - RNA, 21 nt, synthetic construct
  source 1..21: mol_type = other RNA
tttggaaacagtgatccattc

SEQ ID NO: 18698 - RNA, 21 nt, synthetic construct
  source 1..21: mol_type = other RNA
tttggaatggatcactgtttc

SEQ ID NO: 18699 - RNA, 21 nt, synthetic construct
  source 1..21: mol_type = other RNA
tttggtcctagatgaccacat

SEQ ID NO: 18700 - RNA, 21 nt, synthetic construct
  source 1..21: mol_type = other RNA
tttgtgacaatatacaaggat

SEQ ID NO: 18701 - RNA, 21 nt, synthetic construct
  source 1..21: mol_type = other RNA
tttgttagcttagtaacaatt

SEQ ID NO: 18702 - RNA, 21 nt, synthetic construct
  source 1..21: mol_type = other RNA
ttttaaaaacaggtagtcacc

SEQ ID NO: 18703 - RNA, 21 nt, synthetic construct
  source 1..21: mol_type = other RNA
ttttaagagatttacaagtca

SEQ ID NO: 18704 - RNA, 21 nt, synthetic construct
  source 1..21: mol_type = other RNA
ttttcaatttcaagcaacgtg

SEQ ID NO: 18705 - RNA, 21 nt, synthetic construct
  source 1..21: mol_type = other RNA
ttttcccctcaactttaataa

SEQ ID NO: 18706 - RNA, 21 nt, synthetic construct
  source 1..21: mol_type = other RNA
ttttctccactgtgttctgtg

SEQ ID NO: 18707 - RNA, 21 nt, synthetic construct
  source 1..21: mol_type = other RNA
ttttctgaagtttgttagctt

SEQ ID NO: 18708 - RNA, 21 nt, synthetic construct
  source 1..21: mol_type = other RNA
ttttctgggcaaatattggta

SEQ ID NO: 18709 - RNA, 21 nt, synthetic construct
  source 1..21: mol_type = other RNA
ttttcttctggaagcagacct

SEQ ID NO: 18710 - RNA, 21 nt, synthetic construct
  source 1..21: mol_type = other RNA
ttttgacttgtaaatctctta

SEQ ID NO: 18711 - RNA, 21 nt, synthetic construct
  source 1..21: mol_type = other RNA
ttttgcatcaccttatatgtc

SEQ ID NO: 18712 - RNA, 21 nt, synthetic construct
  source 1..21: mol_type = other RNA
ttttggaaacagtgatccatt

SEQ ID NO: 18713 - RNA, 21 nt, synthetic construct
  source 1..21: mol_type = other RNA
ttttggaatggatcactgttt

SEQ ID NO: 18714 - RNA, 21 nt, synthetic construct
  source 1..21: mol_type = other RNA
ttttgtgacaatatacaagga

SEQ ID NO: 18715 - RNA, 21 nt, synthetic construct
  source 1..21: mol_type = other RNA
tttttcccctcaactttaata

SEQ ID NO: 18716 - RNA, 21 nt, synthetic construct
  source 1..21: mol_type = other RNA
tttttctgaagtttgttagct

SEQ ID NO: 18717 - RNA, 21 nt, synthetic construct
  source 1..21: mol_type = other RNA
tttttgacttgtaaatctctt

SEQ ID NO: 18718 - RNA, 21 nt, synthetic construct
  source 1..21: mol_type = other RNA
tttttgcatcaccttatatgt

SEQ ID NO: 18719 - RNA, 21 nt, synthetic construct
  source 1..21: mol_type = other RNA
tttttggaatggatcactgtt

SEQ ID NO: 18720 - RNA, 21 nt, synthetic construct
  source 1..21: mol_type = other RNA
ttttttcccctcaactttaat

SEQ ID NO: 18721 - RNA, 21 nt, synthetic construct
  source 1..21: mol_type = other RNA
ttttttgcatcaccttatatg

SEQ ID NO: 18722 - RNA, 21 nt, synthetic construct
  source 1..21: mol_type = other RNA
ttttttggaatggatcactgt

SEQ ID NO: 18723 - RNA, 22 nt, synthetic construct
  source 1..22: mol_type = other RNA
aaaaaacactttctctctgaag

SEQ ID NO: 18724 - RNA, 22 nt, synthetic construct
  source 1..22: mol_type = other RNA
aaaaaatgaggagcatataatt

SEQ ID NO: 18725 - RNA, 22 nt, synthetic construct
  source 1..22: mol_type = other RNA
aaaaaatgttattaatctcctc

SEQ ID NO: 18726 - RNA, 22 nt, synthetic construct
  source 1..22: mol_type = other RNA
aaaaacactttctctctgaagc

SEQ ID NO: 18727 - RNA, 22 nt, synthetic construct
  source 1..22: mol_type = other RNA
aaaaacaggtagtcaccatagc

SEQ ID NO: 18728 - RNA, 22 nt, synthetic construct
  source 1..22: mol_type = other RNA
aaaaacttatgatgggcaagct

SEQ ID NO: 18729 - RNA, 22 nt, synthetic construct
  source 1..22: mol_type = other RNA
aaaaagaggagattaataacat

SEQ ID NO: 18730 - RNA, 22 nt, synthetic construct
  source 1..22: mol_type = other RNA
aaaaataaacttttttgttggg

SEQ ID NO: 18731 - RNA, 22 nt, synthetic construct
  source 1..22: mol_type = other RNA
aaaaatgaggagcatataatta

SEQ ID NO: 18732 - RNA, 22 nt, synthetic construct
  source 1..22: mol_type = other RNA
aaaaatgttattaatctcctct

SEQ ID NO: 18733 - RNA, 22 nt, synthetic construct
  source 1..22: mol_type = other RNA
aaaacactttctctctgaagcc

SEQ ID NO: 18734 - RNA, 22 nt, synthetic construct
  source 1..22: mol_type = other RNA
aaaacaggtagtcaccatagca

SEQ ID NO: 18735 - RNA, 22 nt, synthetic construct
  source 1..22: mol_type = other RNA
aaaacagttccacgttgcttga

SEQ ID NO: 18736 - RNA, 22 nt, synthetic construct
  source 1..22: mol_type = other RNA
aaaacttatgatgggcaagctg

SEQ ID NO: 18737 - RNA, 22 nt, synthetic construct
  source 1..22: mol_type = other RNA
aaaagaactaaagtacagtttg

SEQ ID NO: 18738 - RNA, 22 nt, synthetic construct
  source 1..22: mol_type = other RNA
aaaagaattgcttgagcccagt

SEQ ID NO: 18739 - RNA, 22 nt, synthetic construct
  source 1..22: mol_type = other RNA
aaaagaggagattaataacatt

SEQ ID NO: 18740 - RNA, 22 nt, synthetic construct
  source 1..22: mol_type = other RNA
aaaagggagtgaaatgtcttta

SEQ ID NO: 18741 - RNA, 22 nt, synthetic construct
  source 1..22: mol_type = other RNA
aaaaggtaaggttggtaggtga

SEQ ID NO: 18742 - RNA, 22 nt, synthetic construct
  source 1..22: mol_type = other RNA
aaaagtaatgaattaagtatgc

SEQ ID NO: 18743 - RNA, 22 nt, synthetic construct
  source 1..22: mol_type = other RNA
aaaataaacttttttgttgggt

SEQ ID NO: 18744 - RNA, 22 nt, synthetic construct
  source 1..22: mol_type = other RNA
aaaatcccatatatagtaagtg

SEQ ID NO: 18745 - RNA, 22 nt, synthetic construct
  source 1..22: mol_type = other RNA
aaaatgaggagcatataattat

SEQ ID NO: 18746 - RNA, 22 nt, synthetic construct
  source 1..22: mol_type = other RNA
aaaatgttattaatctcctctt

SEQ ID NO: 18747 - RNA, 22 nt, synthetic construct
  source 1..22: mol_type = other RNA
aaaattagcttttaaaaacagg

SEQ ID NO: 18748 - RNA, 22 nt, synthetic construct
  source 1..22: mol_type = other RNA
aaaattgttactaagctaacaa

SEQ ID NO: 18749 - RNA, 22 nt, synthetic construct
  source 1..22: mol_type = other RNA
aaacactttctctctgaagcct

SEQ ID NO: 18750 - RNA, 22 nt, synthetic construct
  source 1..22: mol_type = other RNA
aaacaggtagtcaccatagcat

SEQ ID NO: 18751 - RNA, 22 nt, synthetic construct
  source 1..22: mol_type = other RNA
aaacagtgatccattccaaaaa

SEQ ID NO: 18752 - RNA, 22 nt, synthetic construct
  source 1..22: mol_type = other RNA
aaacagttccacgttgcttgaa

SEQ ID NO: 18753 - RNA, 22 nt, synthetic construct
  source 1..22: mol_type = other RNA
aaactacacattcaatgctatg

SEQ ID NO: 18754 - RNA, 22 nt, synthetic construct
  source 1..22: mol_type = other RNA
aaactgtactttagttcttttg

SEQ ID NO: 18755 - RNA, 22 nt, synthetic construct
  source 1..22: mol_type = other RNA
aaacttatgatgggcaagctgc

SEQ ID NO: 18756 - RNA, 22 nt, synthetic construct
  source 1..22: mol_type = other RNA
aaacttcagaaaaacttatgat

SEQ ID NO: 18757 - RNA, 22 nt, synthetic construct
  source 1..22: mol_type = other RNA
aaacttttttgttgggtaaatt

SEQ ID NO: 18758 - RNA, 22 nt, synthetic construct
  source 1..22: mol_type = other RNA
aaagaaatgagcaactaactta

SEQ ID NO: 18759 - RNA, 22 nt, synthetic construct
  source 1..22: mol_type = other RNA
aaagaactaaagtacagtttga

SEQ ID NO: 18760 - RNA, 22 nt, synthetic construct
  source 1..22: mol_type = other RNA
aaagaattgcttgagcccagta

SEQ ID NO: 18761 - RNA, 22 nt, synthetic construct
  source 1..22: mol_type = other RNA
aaagacatttcactcccttttc

SEQ ID NO: 18762 - RNA, 22 nt, synthetic construct
  source 1..22: mol_type = other RNA
aaagagcctagaacacagagac

SEQ ID NO: 18763 - RNA, 22 nt, synthetic construct
  source 1..22: mol_type = other RNA
aaagaggagattaataacattt

SEQ ID NO: 18764 - RNA, 22 nt, synthetic construct
  source 1..22: mol_type = other RNA
aaagatgatgtcttaatgtatt

SEQ ID NO: 18765 - RNA, 22 nt, synthetic construct
  source 1..22: mol_type = other RNA
aaaggcttcagagagaaagtgt

SEQ ID NO: 18766 - RNA, 22 nt, synthetic construct
  source 1..22: mol_type = other RNA
aaagggagtgaaatgtctttaa

SEQ ID NO: 18767 - RNA, 22 nt, synthetic construct
  source 1..22: mol_type = other RNA
aaaggtaaggttggtaggtgaa

SEQ ID NO: 18768 - RNA, 22 nt, synthetic construct
  source 1..22: mol_type = other RNA
aaagtaatgaattaagtatgca

SEQ ID NO: 18769 - RNA, 22 nt, synthetic construct
  source 1..22: mol_type = other RNA
aaagtacagtttgagaaatgca

SEQ ID NO: 18770 - RNA, 22 nt, synthetic construct
  source 1..22: mol_type = other RNA
aaagtgttttttggaatggatc

SEQ ID NO: 18771 - RNA, 22 nt, synthetic construct
  source 1..22: mol_type = other RNA
aaagttgaggggaaaaaagtaa

SEQ ID NO: 18772 - RNA, 22 nt, synthetic construct
  source 1..22: mol_type = other RNA
aaataaacttttttgttgggta

SEQ ID NO: 18773 - RNA, 22 nt, synthetic construct
  source 1..22: mol_type = other RNA
aaataccttcaatgtcacaagc

SEQ ID NO: 18774 - RNA, 22 nt, synthetic construct
  source 1..22: mol_type = other RNA
aaatactgggctcaagcaattc

SEQ ID NO: 18775 - RNA, 22 nt, synthetic construct
  source 1..22: mol_type = other RNA
aaatcaaagaaatgagcaacta

SEQ ID NO: 18776 - RNA, 22 nt, synthetic construct
  source 1..22: mol_type = other RNA
aaatcccatatatagtaagtgt

SEQ ID NO: 18777 - RNA, 22 nt, synthetic construct
  source 1..22: mol_type = other RNA
aaatgaaatcaaagaaatgagc

SEQ ID NO: 18778 - RNA, 22 nt, synthetic construct
  source 1..22: mol_type = other RNA
aaatgagcaactaacttaatag

SEQ ID NO: 18779 - RNA, 22 nt, synthetic construct
  source 1..22: mol_type = other RNA
aaatgaggagcatataattata

SEQ ID NO: 18780 - RNA, 22 nt, synthetic construct
  source 1..22: mol_type = other RNA
aaatgcatacttaattcattac

SEQ ID NO: 18781 - RNA, 22 nt, synthetic construct
  source 1..22: mol_type = other RNA
aaatgtctttaatgacacttac

SEQ ID NO: 18782 - RNA, 22 nt, synthetic construct
  source 1..22: mol_type = other RNA
aaatgttattaatctcctcttt

SEQ ID NO: 18783 - RNA, 22 nt, synthetic construct
  source 1..22: mol_type = other RNA
aaattacctattaagttagttg

SEQ ID NO: 18784 - RNA, 22 nt, synthetic construct
  source 1..22: mol_type = other RNA
aaattagcttttaaaaacaggt

SEQ ID NO: 18785 - RNA, 22 nt, synthetic construct
  source 1..22: mol_type = other RNA
aaattgtatttaactttgctgt

SEQ ID NO: 18786 - RNA, 22 nt, synthetic construct
  source 1..22: mol_type = other RNA
aaattgttactaagctaacaaa

SEQ ID NO: 18787 - RNA, 22 nt, synthetic construct
  source 1..22: mol_type = other RNA
aaatttacccaacaaaaaagtt

SEQ ID NO: 18788 - RNA, 22 nt, synthetic construct
  source 1..22: mol_type = other RNA
aacaaaaagaggagattaataa

SEQ ID NO: 18789 - RNA, 22 nt, synthetic construct
  source 1..22: mol_type = other RNA
aacaaacttcagaaaaacttat

SEQ ID NO: 18790 - RNA, 22 nt, synthetic construct
  source 1..22: mol_type = other RNA
aacaatggatatgtggtcatct

SEQ ID NO: 18791 - RNA, 22 nt, synthetic construct
  source 1..22: mol_type = other RNA
aacacagagacacagaacacag

SEQ ID NO: 18792 - RNA, 22 nt, synthetic construct
  source 1..22: mol_type = other RNA
aacacagcattgagagccgtaa

SEQ ID NO: 18793 - RNA, 22 nt, synthetic construct
  source 1..22: mol_type = other RNA
aacacagtggagaaaagggagt

SEQ ID NO: 18794 - RNA, 22 nt, synthetic construct
  source 1..22: mol_type = other RNA
aacaccacctgagggagtggag

SEQ ID NO: 18795 - RNA, 22 nt, synthetic construct
  source 1..22: mol_type = other RNA
aacacggcttaatgattaacta

SEQ ID NO: 18796 - RNA, 22 nt, synthetic construct
  source 1..22: mol_type = other RNA
aacactttctctctgaagcctt

SEQ ID NO: 18797 - RNA, 22 nt, synthetic construct
  source 1..22: mol_type = other RNA
aacaggtagtcaccatagcatt

SEQ ID NO: 18798 - RNA, 22 nt, synthetic construct
  source 1..22: mol_type = other RNA
aacagtgatccattccaaaaaa

SEQ ID NO: 18799 - RNA, 22 nt, synthetic construct
  source 1..22: mol_type = other RNA
aacagttccacgttgcttgaaa

SEQ ID NO: 18800 - RNA, 22 nt, synthetic construct
  source 1..22: mol_type = other RNA
aacatagttaatcattaagccg

SEQ ID NO: 18801 - RNA, 22 nt, synthetic construct
  source 1..22: mol_type = other RNA
aaccatccttgtatattgtcac

SEQ ID NO: 18802 - RNA, 22 nt, synthetic construct
  source 1..22: mol_type = other RNA
aaccttaccttttctgggcaaa

SEQ ID NO: 18803 - RNA, 22 nt, synthetic construct
  source 1..22: mol_type = other RNA
aaccttcttccacattgagtta

SEQ ID NO: 18804 - RNA, 22 nt, synthetic construct
  source 1..22: mol_type = other RNA
aacgagcacatggtaaagagcc

SEQ ID NO: 18805 - RNA, 22 nt, synthetic construct
  source 1..22: mol_type = other RNA
aacgtggaactgttttcttctg

SEQ ID NO: 18806 - RNA, 22 nt, synthetic construct
  source 1..22: mol_type = other RNA
aactaaagtacagtttgagaaa

SEQ ID NO: 18807 - RNA, 22 nt, synthetic construct
  source 1..22: mol_type = other RNA
aactaacttaataggtaatttg

SEQ ID NO: 18808 - RNA, 22 nt, synthetic construct
  source 1..22: mol_type = other RNA
aactacacattcaatgctatgg

SEQ ID NO: 18809 - RNA, 22 nt, synthetic construct
  source 1..22: mol_type = other RNA
aactatgttcacctaccaacct

SEQ ID NO: 18810 - RNA, 22 nt, synthetic construct
  source 1..22: mol_type = other RNA
aactcaatgtggaagaaggtta

SEQ ID NO: 18811 - RNA, 22 nt, synthetic construct
  source 1..22: mol_type = other RNA
aactgtactttagttcttttgg

SEQ ID NO: 18812 - RNA, 22 nt, synthetic construct
  source 1..22: mol_type = other RNA
aactgttttcttctggaagcag

SEQ ID NO: 18813 - RNA, 22 nt, synthetic construct
  source 1..22: mol_type = other RNA
aacttatgatgggcaagctgct

SEQ ID NO: 18814 - RNA, 22 nt, synthetic construct
  source 1..22: mol_type = other RNA
aacttcagaaaaacttatgatg

SEQ ID NO: 18815 - RNA, 22 nt, synthetic construct
  source 1..22: mol_type = other RNA
aacttgcacgaatgtaaccttc

SEQ ID NO: 18816 - RNA, 22 nt, synthetic construct
  source 1..22: mol_type = other RNA
aactttgctgtattataaacta

SEQ ID NO: 18817 - RNA, 22 nt, synthetic construct
  source 1..22: mol_type = other RNA
aacttttttgttgggtaaattt

SEQ ID NO: 18818 - RNA, 22 nt, synthetic construct
  source 1..22: mol_type = other RNA
aagaaaacagttccacgttgct

SEQ ID NO: 18819 - RNA, 22 nt, synthetic construct
  source 1..22: mol_type = other RNA
aagaaatgagcaactaacttaa

SEQ ID NO: 18820 - RNA, 22 nt, synthetic construct
  source 1..22: mol_type = other RNA
aagaactaaagtacagtttgag

SEQ ID NO: 18821 - RNA, 22 nt, synthetic construct
  source 1..22: mol_type = other RNA
aagaaggttacattcgtgcaag

SEQ ID NO: 18822 - RNA, 22 nt, synthetic construct
  source 1..22: mol_type = other RNA
aagaagtctaggtctgcttcca

SEQ ID NO: 18823 - RNA, 22 nt, synthetic construct
  source 1..22: mol_type = other RNA
aagaattgcttgagcccagtat

SEQ ID NO: 18824 - RNA, 22 nt, synthetic construct
  source 1..22: mol_type = other RNA
aagacatataaggtgatgcaaa

SEQ ID NO: 18825 - RNA, 22 nt, synthetic construct
  source 1..22: mol_type = other RNA
aagacatttcactcccttttct

SEQ ID NO: 18826 - RNA, 22 nt, synthetic construct
  source 1..22: mol_type = other RNA
aagagatttacaagtcaaaaat

SEQ ID NO: 18827 - RNA, 22 nt, synthetic construct
  source 1..22: mol_type = other RNA
aagagcctagaacacagagaca

SEQ ID NO: 18828 - RNA, 22 nt, synthetic construct
  source 1..22: mol_type = other RNA
aagaggagattaataacatttt

SEQ ID NO: 18829 - RNA, 22 nt, synthetic construct
  source 1..22: mol_type = other RNA
aagatgatgtcttaatgtattg

SEQ ID NO: 18830 - RNA, 22 nt, synthetic construct
  source 1..22: mol_type = other RNA
aagattcaattctagtttggtc

SEQ ID NO: 18831 - RNA, 22 nt, synthetic construct
  source 1..22: mol_type = other RNA
aagcaacgtggaactgttttct

SEQ ID NO: 18832 - RNA, 22 nt, synthetic construct
  source 1..22: mol_type = other RNA
aagcagacctagacttcttaac

SEQ ID NO: 18833 - RNA, 22 nt, synthetic construct
  source 1..22: mol_type = other RNA
aagcagcttgcccatcataagt

SEQ ID NO: 18834 - RNA, 22 nt, synthetic construct
  source 1..22: mol_type = other RNA
aagccgtgttaacttgcacgaa

SEQ ID NO: 18835 - RNA, 22 nt, synthetic construct
  source 1..22: mol_type = other RNA
aagcctttctccactccctcag

SEQ ID NO: 18836 - RNA, 22 nt, synthetic construct
  source 1..22: mol_type = other RNA
aagctaacaaacttcagaaaaa

SEQ ID NO: 18837 - RNA, 22 nt, synthetic construct
  source 1..22: mol_type = other RNA
aagctgcttgtgacattgaagg

SEQ ID NO: 18838 - RNA, 22 nt, synthetic construct
  source 1..22: mol_type = other RNA
aaggaacaatggatatgtggtc

SEQ ID NO: 18839 - RNA, 22 nt, synthetic construct
  source 1..22: mol_type = other RNA
aaggatggttaagacatataag

SEQ ID NO: 18840 - RNA, 22 nt, synthetic construct
  source 1..22: mol_type = other RNA
aaggcttcagagagaaagtgtt

SEQ ID NO: 18841 - RNA, 22 nt, synthetic construct
  source 1..22: mol_type = other RNA
aagggagtgaaatgtctttaat

SEQ ID NO: 18842 - RNA, 22 nt, synthetic construct
  source 1..22: mol_type = other RNA
aaggtaaaagaattgcttgagc

SEQ ID NO: 18843 - RNA, 22 nt, synthetic construct
  source 1..22: mol_type = other RNA
aaggtaaggttggtaggtgaac

SEQ ID NO: 18844 - RNA, 22 nt, synthetic construct
  source 1..22: mol_type = other RNA
aaggtatttaagattcaattct

SEQ ID NO: 18845 - RNA, 22 nt, synthetic construct
  source 1..22: mol_type = other RNA
aaggttacattcgtgcaagtta

SEQ ID NO: 18846 - RNA, 22 nt, synthetic construct
  source 1..22: mol_type = other RNA
aaggttggtaggtgaacatagt

SEQ ID NO: 18847 - RNA, 22 nt, synthetic construct
  source 1..22: mol_type = other RNA
aagtaatgaattaagtatgcat

SEQ ID NO: 18848 - RNA, 22 nt, synthetic construct
  source 1..22: mol_type = other RNA
aagtacagtttgagaaatgcat

SEQ ID NO: 18849 - RNA, 22 nt, synthetic construct
  source 1..22: mol_type = other RNA
aagtatgcatttctcaaactgt

SEQ ID NO: 18850 - RNA, 22 nt, synthetic construct
  source 1..22: mol_type = other RNA
aagtctaggtctgcttccagaa

SEQ ID NO: 18851 - RNA, 22 nt, synthetic construct
  source 1..22: mol_type = other RNA
aagtgtcattaaagacatttca

SEQ ID NO: 18852 - RNA, 22 nt, synthetic construct
  source 1..22: mol_type = other RNA
aagtgttttttggaatggatca

SEQ ID NO: 18853 - RNA, 22 nt, synthetic construct
  source 1..22: mol_type = other RNA
aagttaacacggcttaatgatt

SEQ ID NO: 18854 - RNA, 22 nt, synthetic construct
  source 1..22: mol_type = other RNA
aagttagttgctcatttctttg

SEQ ID NO: 18855 - RNA, 22 nt, synthetic construct
  source 1..22: mol_type = other RNA
aagttgaggggaaaaaagtaat

SEQ ID NO: 18856 - RNA, 22 nt, synthetic construct
  source 1..22: mol_type = other RNA
aagtttgttagcttagtaacaa

SEQ ID NO: 18857 - RNA, 22 nt, synthetic construct
  source 1..22: mol_type = other RNA
aagtttttctgaagtttgttag

SEQ ID NO: 18858 - RNA, 22 nt, synthetic construct
  source 1..22: mol_type = other RNA
aataaacttttttgttgggtaa

SEQ ID NO: 18859 - RNA, 22 nt, synthetic construct
  source 1..22: mol_type = other RNA
aatacagcaaagttaaatacaa

SEQ ID NO: 18860 - RNA, 22 nt, synthetic construct
  source 1..22: mol_type = other RNA
aatacattaagacatcatcttt

SEQ ID NO: 18861 - RNA, 22 nt, synthetic construct
  source 1..22: mol_type = other RNA
aataccttcaatgtcacaagca

SEQ ID NO: 18862 - RNA, 22 nt, synthetic construct
  source 1..22: mol_type = other RNA
aatactgggctcaagcaattct

SEQ ID NO: 18863 - RNA, 22 nt, synthetic construct
  source 1..22: mol_type = other RNA
aatatacaaggatggttaagac

SEQ ID NO: 18864 - RNA, 22 nt, synthetic construct
  source 1..22: mol_type = other RNA
aatatttgcccagaaaaggtaa

SEQ ID NO: 18865 - RNA, 22 nt, synthetic construct
  source 1..22: mol_type = other RNA
aatcaaagaaatgagcaactaa

SEQ ID NO: 18866 - RNA, 22 nt, synthetic construct
  source 1..22: mol_type = other RNA
aatcattaagccgtgttaactt

SEQ ID NO: 18867 - RNA, 22 nt, synthetic construct
  source 1..22: mol_type = other RNA
aatcccatatatagtaagtgtc

SEQ ID NO: 18868 - RNA, 22 nt, synthetic construct
  source 1..22: mol_type = other RNA
aatctcctctttttgttaaatg

SEQ ID NO: 18869 - RNA, 22 nt, synthetic construct
  source 1..22: mol_type = other RNA
aatcttaaataccttcaatgtc

SEQ ID NO: 18870 - RNA, 22 nt, synthetic construct
  source 1..22: mol_type = other RNA
aatgaaatcaaagaaatgagca

SEQ ID NO: 18871 - RNA, 22 nt, synthetic construct
  source 1..22: mol_type = other RNA
aatgaattaagtatgcatttct

SEQ ID NO: 18872 - RNA, 22 nt, synthetic construct
  source 1..22: mol_type = other RNA
aatgacacttactatatatggg

SEQ ID NO: 18873 - RNA, 22 nt, synthetic construct
  source 1..22: mol_type = other RNA
aatgagcaactaacttaatagg

SEQ ID NO: 18874 - RNA, 22 nt, synthetic construct
  source 1..22: mol_type = other RNA
aatgaggagcatataattatac

SEQ ID NO: 18875 - RNA, 22 nt, synthetic construct
  source 1..22: mol_type = other RNA
aatgattaactatgttcaccta

SEQ ID NO: 18876 - RNA, 22 nt, synthetic construct
  source 1..22: mol_type = other RNA
aatgcatacttaattcattact

SEQ ID NO: 18877 - RNA, 22 nt, synthetic construct
  source 1..22: mol_type = other RNA
aatgctaaatgaaatcaaagaa

SEQ ID NO: 18878 - RNA, 22 nt, synthetic construct
  source 1..22: mol_type = other RNA
aatgctatggtgactacctgtt

SEQ ID NO: 18879 - RNA, 22 nt, synthetic construct
  source 1..22: mol_type = other RNA
aatgctgtgttcctctggtact

SEQ ID NO: 18880 - RNA, 22 nt, synthetic construct
  source 1..22: mol_type = other RNA
aatggatatgtggtcatctagg

SEQ ID NO: 18881 - RNA, 22 nt, synthetic construct
  source 1..22: mol_type = other RNA
aatggatcactgtttccaaaag

SEQ ID NO: 18882 - RNA, 22 nt, synthetic construct
  source 1..22: mol_type = other RNA
aatgtaaccttcttccacattg

SEQ ID NO: 18883 - RNA, 22 nt, synthetic construct
  source 1..22: mol_type = other RNA
aatgtataattatatgctcctc

SEQ ID NO: 18884 - RNA, 22 nt, synthetic construct
  source 1..22: mol_type = other RNA
aatgtattgcccatgctggtct

SEQ ID NO: 18885 - RNA, 22 nt, synthetic construct
  source 1..22: mol_type = other RNA
aatgtcacaagcagcttgccca

SEQ ID NO: 18886 - RNA, 22 nt, synthetic construct
  source 1..22: mol_type = other RNA
aatgtctttaatgacacttact

SEQ ID NO: 18887 - RNA, 22 nt, synthetic construct
  source 1..22: mol_type = other RNA
aatgtggaagaaggttacattc

SEQ ID NO: 18888 - RNA, 22 nt, synthetic construct
  source 1..22: mol_type = other RNA
aatgtgtagtttataatacagc

SEQ ID NO: 18889 - RNA, 22 nt, synthetic construct
  source 1..22: mol_type = other RNA
aatgttattaatctcctctttt

SEQ ID NO: 18890 - RNA, 22 nt, synthetic construct
  source 1..22: mol_type = other RNA
aattaagtatgcatttctcaaa

SEQ ID NO: 18891 - RNA, 22 nt, synthetic construct
  source 1..22: mol_type = other RNA
aattacctattaagttagttgc

SEQ ID NO: 18892 - RNA, 22 nt, synthetic construct
  source 1..22: mol_type = other RNA
aattagcttttaaaaacaggta

SEQ ID NO: 18893 - RNA, 22 nt, synthetic construct
  source 1..22: mol_type = other RNA
aattatagtgacaaaaaatgag

SEQ ID NO: 18894 - RNA, 22 nt, synthetic construct
  source 1..22: mol_type = other RNA
aattatatgctcctcatttttt

SEQ ID NO: 18895 - RNA, 22 nt, synthetic construct
  source 1..22: mol_type = other RNA
aattcattacttttttcccctc

SEQ ID NO: 18896 - RNA, 22 nt, synthetic construct
  source 1..22: mol_type = other RNA
aattctagtttggtcctagatg

SEQ ID NO: 18897 - RNA, 22 nt, synthetic construct
  source 1..22: mol_type = other RNA
aattgaatcttaaataccttca

SEQ ID NO: 18898 - RNA, 22 nt, synthetic construct
  source 1..22: mol_type = other RNA
aattgcttgagcccagtatttc

SEQ ID NO: 18899 - RNA, 22 nt, synthetic construct
  source 1..22: mol_type = other RNA
aattgtatttaactttgctgta

SEQ ID NO: 18900 - RNA, 22 nt, synthetic construct
  source 1..22: mol_type = other RNA
aattgttactaagctaacaaac

SEQ ID NO: 18901 - RNA, 22 nt, synthetic construct
  source 1..22: mol_type = other RNA
aatttacccaacaaaaaagttt

SEQ ID NO: 18902 - RNA, 22 nt, synthetic construct
  source 1..22: mol_type = other RNA
aatttattattaaagttgaggg

SEQ ID NO: 18903 - RNA, 22 nt, synthetic construct
  source 1..22: mol_type = other RNA
aatttcaagcaacgtggaactg

SEQ ID NO: 18904 - RNA, 22 nt, synthetic construct
  source 1..22: mol_type = other RNA
acaaaaaatgaggagcatataa

SEQ ID NO: 18905 - RNA, 22 nt, synthetic construct
  source 1..22: mol_type = other RNA
acaaaaagaggagattaataac

SEQ ID NO: 18906 - RNA, 22 nt, synthetic construct
  source 1..22: mol_type = other RNA
acaaaatcccatatatagtaag

SEQ ID NO: 18907 - RNA, 22 nt, synthetic construct
  source 1..22: mol_type = other RNA
acaaacttcagaaaaacttatg

SEQ ID NO: 18908 - RNA, 22 nt, synthetic construct
  source 1..22: mol_type = other RNA
acaagcagcttgcccatcataa

SEQ ID NO: 18909 - RNA, 22 nt, synthetic construct
  source 1..22: mol_type = other RNA
acaaggatggttaagacatata

SEQ ID NO: 18910 - RNA, 22 nt, synthetic construct
  source 1..22: mol_type = other RNA
acaatatacaaggatggttaag

SEQ ID NO: 18911 - RNA, 22 nt, synthetic construct
  source 1..22: mol_type = other RNA
acaatggatatgtggtcatcta

SEQ ID NO: 18912 - RNA, 22 nt, synthetic construct
  source 1..22: mol_type = other RNA
acaattatagtgacaaaaaatg

SEQ ID NO: 18913 - RNA, 22 nt, synthetic construct
  source 1..22: mol_type = other RNA
acacagaacacagtggagaaaa

SEQ ID NO: 18914 - RNA, 22 nt, synthetic construct
  source 1..22: mol_type = other RNA
acacagagacacagaacacagt

SEQ ID NO: 18915 - RNA, 22 nt, synthetic construct
  source 1..22: mol_type = other RNA
acacagcattgagagccgtaac

SEQ ID NO: 18916 - RNA, 22 nt, synthetic construct
  source 1..22: mol_type = other RNA
acacagtggagaaaagggagtg

SEQ ID NO: 18917 - RNA, 22 nt, synthetic construct
  source 1..22: mol_type = other RNA
acacattcaatgctatggtgac

SEQ ID NO: 18918 - RNA, 22 nt, synthetic construct
  source 1..22: mol_type = other RNA
acaccacctgagggagtggaga

SEQ ID NO: 18919 - RNA, 22 nt, synthetic construct
  source 1..22: mol_type = other RNA
acacggcttaatgattaactat

SEQ ID NO: 18920 - RNA, 22 nt, synthetic construct
  source 1..22: mol_type = other RNA
acacttactatatatgggattt

SEQ ID NO: 18921 - RNA, 22 nt, synthetic construct
  source 1..22: mol_type = other RNA
acactttctctctgaagccttt

SEQ ID NO: 18922 - RNA, 22 nt, synthetic construct
  source 1..22: mol_type = other RNA
acagaacacagtggagaaaagg

SEQ ID NO: 18923 - RNA, 22 nt, synthetic construct
  source 1..22: mol_type = other RNA
acagagacacagaacacagtgg

SEQ ID NO: 18924 - RNA, 22 nt, synthetic construct
  source 1..22: mol_type = other RNA
acagagtaccagaggaacacag

SEQ ID NO: 18925 - RNA, 22 nt, synthetic construct
  source 1..22: mol_type = other RNA
acagcaaagttaaatacaattt

SEQ ID NO: 18926 - RNA, 22 nt, synthetic construct
  source 1..22: mol_type = other RNA
acagcattgagagccgtaacac

SEQ ID NO: 18927 - RNA, 22 nt, synthetic construct
  source 1..22: mol_type = other RNA
acaggtagtcaccatagcattg

SEQ ID NO: 18928 - RNA, 22 nt, synthetic construct
  source 1..22: mol_type = other RNA
acagtgatccattccaaaaaac

SEQ ID NO: 18929 - RNA, 22 nt, synthetic construct
  source 1..22: mol_type = other RNA
acagtggagaaaagggagtgaa

SEQ ID NO: 18930 - RNA, 22 nt, synthetic construct
  source 1..22: mol_type = other RNA
acagttccacgttgcttgaaat

SEQ ID NO: 18931 - RNA, 22 nt, synthetic construct
  source 1..22: mol_type = other RNA
acagtttgagaaatgcatactt

SEQ ID NO: 18932 - RNA, 22 nt, synthetic construct
  source 1..22: mol_type = other RNA
acatagttaatcattaagccgt

SEQ ID NO: 18933 - RNA, 22 nt, synthetic construct
  source 1..22: mol_type = other RNA
acatataaggtgatgcaaaaaa

SEQ ID NO: 18934 - RNA, 22 nt, synthetic construct
  source 1..22: mol_type = other RNA
acatatccattgttccttcaac

SEQ ID NO: 18935 - RNA, 22 nt, synthetic construct
  source 1..22: mol_type = other RNA
acatattaacaattatagtgac

SEQ ID NO: 18936 - RNA, 22 nt, synthetic construct
  source 1..22: mol_type = other RNA
acatggtaaagagcctagaaca

SEQ ID NO: 18937 - RNA, 22 nt, synthetic construct
  source 1..22: mol_type = other RNA
acattaagacatcatctttaaa

SEQ ID NO: 18938 - RNA, 22 nt, synthetic construct
  source 1..22: mol_type = other RNA
acattcaatgctatggtgacta

SEQ ID NO: 18939 - RNA, 22 nt, synthetic construct
  source 1..22: mol_type = other RNA
acattcgtgcaagttaacacgg

SEQ ID NO: 18940 - RNA, 22 nt, synthetic construct
  source 1..22: mol_type = other RNA
acattgaaggtatttaagattc

SEQ ID NO: 18941 - RNA, 22 nt, synthetic construct
  source 1..22: mol_type = other RNA
acattgagttagatcaatgcta

SEQ ID NO: 18942 - RNA, 22 nt, synthetic construct
  source 1..22: mol_type = other RNA
acattgatttatacagagtacc

SEQ ID NO: 18943 - RNA, 22 nt, synthetic construct
  source 1..22: mol_type = other RNA
acatttaacaaaaagaggagat

SEQ ID NO: 18944 - RNA, 22 nt, synthetic construct
  source 1..22: mol_type = other RNA
acatttcactcccttttctcca

SEQ ID NO: 18945 - RNA, 22 nt, synthetic construct
  source 1..22: mol_type = other RNA
accaaactagaattgaatctta

SEQ ID NO: 18946 - RNA, 22 nt, synthetic construct
  source 1..22: mol_type = other RNA
accaaccttaccttttctgggc

SEQ ID NO: 18947 - RNA, 22 nt, synthetic construct
  source 1..22: mol_type = other RNA
accaatatttgcccagaaaagg

SEQ ID NO: 18948 - RNA, 22 nt, synthetic construct
  source 1..22: mol_type = other RNA
accacatatccattgttccttc

SEQ ID NO: 18949 - RNA, 22 nt, synthetic construct
  source 1..22: mol_type = other RNA
accacctgagggagtggagaaa

SEQ ID NO: 18950 - RNA, 22 nt, synthetic construct
  source 1..22: mol_type = other RNA
accagaggaacacagcattgag

SEQ ID NO: 18951 - RNA, 22 nt, synthetic construct
  source 1..22: mol_type = other RNA
accagcatgggcaatacattaa

SEQ ID NO: 18952 - RNA, 22 nt, synthetic construct
  source 1..22: mol_type = other RNA
accatagcattgaatgtgtagt

SEQ ID NO: 18953 - RNA, 22 nt, synthetic construct
  source 1..22: mol_type = other RNA
accatccttgtatattgtcaca

SEQ ID NO: 18954 - RNA, 22 nt, synthetic construct
  source 1..22: mol_type = other RNA
accatgtgctcgttgaaggaac

SEQ ID NO: 18955 - RNA, 22 nt, synthetic construct
  source 1..22: mol_type = other RNA
acccaacaaaaaagtttatttt

SEQ ID NO: 18956 - RNA, 22 nt, synthetic construct
  source 1..22: mol_type = other RNA
acctaccaaccttaccttttct

SEQ ID NO: 18957 - RNA, 22 nt, synthetic construct
  source 1..22: mol_type = other RNA
acctagacttcttaactctata

SEQ ID NO: 18958 - RNA, 22 nt, synthetic construct
  source 1..22: mol_type = other RNA
acctattaagttagttgctcat

SEQ ID NO: 18959 - RNA, 22 nt, synthetic construct
  source 1..22: mol_type = other RNA
acctgagggagtggagaaaggc

SEQ ID NO: 18960 - RNA, 22 nt, synthetic construct
  source 1..22: mol_type = other RNA
acctgtttttaaaagctaattt

SEQ ID NO: 18961 - RNA, 22 nt, synthetic construct
  source 1..22: mol_type = other RNA
accttaccttttctgggcaaat

SEQ ID NO: 18962 - RNA, 22 nt, synthetic construct
  source 1..22: mol_type = other RNA
accttatatgtcttaaccatcc

SEQ ID NO: 18963 - RNA, 22 nt, synthetic construct
  source 1..22: mol_type = other RNA
accttcaatgtcacaagcagct

SEQ ID NO: 18964 - RNA, 22 nt, synthetic construct
  source 1..22: mol_type = other RNA
accttcttccacattgagttag

SEQ ID NO: 18965 - RNA, 22 nt, synthetic construct
  source 1..22: mol_type = other RNA
accttttctgggcaaatattgg

SEQ ID NO: 18966 - RNA, 22 nt, synthetic construct
  source 1..22: mol_type = other RNA
acgaatgtaaccttcttccaca

SEQ ID NO: 18967 - RNA, 22 nt, synthetic construct
  source 1..22: mol_type = other RNA
acgagcacatggtaaagagcct

SEQ ID NO: 18968 - RNA, 22 nt, synthetic construct
  source 1..22: mol_type = other RNA
acggctctcaatgctgtgttcc

SEQ ID NO: 18969 - RNA, 22 nt, synthetic construct
  source 1..22: mol_type = other RNA
acggcttaatgattaactatgt

SEQ ID NO: 18970 - RNA, 22 nt, synthetic construct
  source 1..22: mol_type = other RNA
acgtggaactgttttcttctgg

SEQ ID NO: 18971 - RNA, 22 nt, synthetic construct
  source 1..22: mol_type = other RNA
acgttgcttgaaattgaaaatc

SEQ ID NO: 18972 - RNA, 22 nt, synthetic construct
  source 1..22: mol_type = other RNA
actaaagtacagtttgagaaat

SEQ ID NO: 18973 - RNA, 22 nt, synthetic construct
  source 1..22: mol_type = other RNA
actaacttaataggtaatttga

SEQ ID NO: 18974 - RNA, 22 nt, synthetic construct
  source 1..22: mol_type = other RNA
actaagctaacaaacttcagaa

SEQ ID NO: 18975 - RNA, 22 nt, synthetic construct
  source 1..22: mol_type = other RNA
actacacattcaatgctatggt

SEQ ID NO: 18976 - RNA, 22 nt, synthetic construct
  source 1..22: mol_type = other RNA
actacctgtttttaaaagctaa

SEQ ID NO: 18977 - RNA, 22 nt, synthetic construct
  source 1..22: mol_type = other RNA
actagaattgaatcttaaatac

SEQ ID NO: 18978 - RNA, 22 nt, synthetic construct
  source 1..22: mol_type = other RNA
actatatatgggattttgtgac

SEQ ID NO: 18979 - RNA, 22 nt, synthetic construct
  source 1..22: mol_type = other RNA
actatgttcacctaccaacctt

SEQ ID NO: 18980 - RNA, 22 nt, synthetic construct
  source 1..22: mol_type = other RNA
actcaatgtggaagaaggttac

SEQ ID NO: 18981 - RNA, 22 nt, synthetic construct
  source 1..22: mol_type = other RNA
actccctcaggtggtgttacgg

SEQ ID NO: 18982 - RNA, 22 nt, synthetic construct
  source 1..22: mol_type = other RNA
actcccttttctccactgtgtt

SEQ ID NO: 18983 - RNA, 22 nt, synthetic construct
  source 1..22: mol_type = other RNA
actctatatataccaatatttg

SEQ ID NO: 18984 - RNA, 22 nt, synthetic construct
  source 1..22: mol_type = other RNA
actctgtataaatcaatgtata

SEQ ID NO: 18985 - RNA, 22 nt, synthetic construct
  source 1..22: mol_type = other RNA
actgggctcaagcaattctttt

SEQ ID NO: 18986 - RNA, 22 nt, synthetic construct
  source 1..22: mol_type = other RNA
actgtactttagttcttttgga

SEQ ID NO: 18987 - RNA, 22 nt, synthetic construct
  source 1..22: mol_type = other RNA
actgtgttctgtgtctctgtgt

SEQ ID NO: 18988 - RNA, 22 nt, synthetic construct
  source 1..22: mol_type = other RNA
actgtttccaaaagaactaaag

SEQ ID NO: 18989 - RNA, 22 nt, synthetic construct
  source 1..22: mol_type = other RNA
actgttttcttctggaagcaga

SEQ ID NO: 18990 - RNA, 22 nt, synthetic construct
  source 1..22: mol_type = other RNA
acttaattcattacttttttcc

SEQ ID NO: 18991 - RNA, 22 nt, synthetic construct
  source 1..22: mol_type = other RNA
acttactatatatgggattttg

SEQ ID NO: 18992 - RNA, 22 nt, synthetic construct
  source 1..22: mol_type = other RNA
acttatgatgggcaagctgctt

SEQ ID NO: 18993 - RNA, 22 nt, synthetic construct
  source 1..22: mol_type = other RNA
acttcagaaaaacttatgatgg

SEQ ID NO: 18994 - RNA, 22 nt, synthetic construct
  source 1..22: mol_type = other RNA
acttcttaactctatatatacc

SEQ ID NO: 18995 - RNA, 22 nt, synthetic construct
  source 1..22: mol_type = other RNA
acttgcacgaatgtaaccttct

SEQ ID NO: 18996 - RNA, 22 nt, synthetic construct
  source 1..22: mol_type = other RNA
acttgtaaatctcttaaaatca

SEQ ID NO: 18997 - RNA, 22 nt, synthetic construct
  source 1..22: mol_type = other RNA
actttagttcttttggaaacag

SEQ ID NO: 18998 - RNA, 22 nt, synthetic construct
  source 1..22: mol_type = other RNA
actttctctctgaagcctttct

SEQ ID NO: 18999 - RNA, 22 nt, synthetic construct
  source 1..22: mol_type = other RNA
actttgctgtattataaactac

SEQ ID NO: 19000 - RNA, 22 nt, synthetic construct
  source 1..22: mol_type = other RNA
acttttttcccctcaactttaa

SEQ ID NO: 19001 - RNA, 22 nt, synthetic construct
  source 1..22: mol_type = other RNA
acttttttgttgggtaaattta

SEQ ID NO: 19002 - RNA, 22 nt, synthetic construct
  source 1..22: mol_type = other RNA
agaaaaacttatgatgggcaag

SEQ ID NO: 19003 - RNA, 22 nt, synthetic construct
  source 1..22: mol_type = other RNA
agaaaacagttccacgttgctt

SEQ ID NO: 19004 - RNA, 22 nt, synthetic construct
  source 1..22: mol_type = other RNA
agaaaagggagtgaaatgtctt

SEQ ID NO: 19005 - RNA, 22 nt, synthetic construct
  source 1..22: mol_type = other RNA
agaaaaggtaaggttggtaggt

SEQ ID NO: 19006 - RNA, 22 nt, synthetic construct
  source 1..22: mol_type = other RNA
agaaaggcttcagagagaaagt

SEQ ID NO: 19007 - RNA, 22 nt, synthetic construct
  source 1..22: mol_type = other RNA
agaaagtgttttttggaatgga

SEQ ID NO: 19008 - RNA, 22 nt, synthetic construct
  source 1..22: mol_type = other RNA
agaaatgagcaactaacttaat

SEQ ID NO: 19009 - RNA, 22 nt, synthetic construct
  source 1..22: mol_type = other RNA
agaaatgcatacttaattcatt

SEQ ID NO: 19010 - RNA, 22 nt, synthetic construct
  source 1..22: mol_type = other RNA
agaacacagagacacagaacac

SEQ ID NO: 19011 - RNA, 22 nt, synthetic construct
  source 1..22: mol_type = other RNA
agaacacagtggagaaaaggga

SEQ ID NO: 19012 - RNA, 22 nt, synthetic construct
  source 1..22: mol_type = other RNA
agaactaaagtacagtttgaga

SEQ ID NO: 19013 - RNA, 22 nt, synthetic construct
  source 1..22: mol_type = other RNA
agaagaaaacagttccacgttg

SEQ ID NO: 19014 - RNA, 22 nt, synthetic construct
  source 1..22: mol_type = other RNA
agaaggttacattcgtgcaagt

SEQ ID NO: 19015 - RNA, 22 nt, synthetic construct
  source 1..22: mol_type = other RNA
agaagtctaggtctgcttccag

SEQ ID NO: 19016 - RNA, 22 nt, synthetic construct
  source 1..22: mol_type = other RNA
agaattgaatcttaaatacctt

SEQ ID NO: 19017 - RNA, 22 nt, synthetic construct
  source 1..22: mol_type = other RNA
agaattgcttgagcccagtatt

SEQ ID NO: 19018 - RNA, 22 nt, synthetic construct
  source 1..22: mol_type = other RNA
agacacagaacacagtggagaa

SEQ ID NO: 19019 - RNA, 22 nt, synthetic construct
  source 1..22: mol_type = other RNA
agacatataaggtgatgcaaaa

SEQ ID NO: 19020 - RNA, 22 nt, synthetic construct
  source 1..22: mol_type = other RNA
agacatttcactcccttttctc

SEQ ID NO: 19021 - RNA, 22 nt, synthetic construct
  source 1..22: mol_type = other RNA
agaccagcatgggcaatacatt

SEQ ID NO: 19022 - RNA, 22 nt, synthetic construct
  source 1..22: mol_type = other RNA
agacctagacttcttaactcta

SEQ ID NO: 19023 - RNA, 22 nt, synthetic construct
  source 1..22: mol_type = other RNA
agacttcttaactctatatata

SEQ ID NO: 19024 - RNA, 22 nt, synthetic construct
  source 1..22: mol_type = other RNA
agagaaagtgttttttggaatg

SEQ ID NO: 19025 - RNA, 22 nt, synthetic construct
  source 1..22: mol_type = other RNA
agagacacagaacacagtggag

SEQ ID NO: 19026 - RNA, 22 nt, synthetic construct
  source 1..22: mol_type = other RNA
agagagaaagtgttttttggaa

SEQ ID NO: 19027 - RNA, 22 nt, synthetic construct
  source 1..22: mol_type = other RNA
agagatttacaagtcaaaaata

SEQ ID NO: 19028 - RNA, 22 nt, synthetic construct
  source 1..22: mol_type = other RNA
agagccgtaacaccacctgagg

SEQ ID NO: 19029 - RNA, 22 nt, synthetic construct
  source 1..22: mol_type = other RNA
agagcctagaacacagagacac

SEQ ID NO: 19030 - RNA, 22 nt, synthetic construct
  source 1..22: mol_type = other RNA
agaggaacacagcattgagagc

SEQ ID NO: 19031 - RNA, 22 nt, synthetic construct
  source 1..22: mol_type = other RNA
agaggagattaataacattttt

SEQ ID NO: 19032 - RNA, 22 nt, synthetic construct
  source 1..22: mol_type = other RNA
agagtaccagaggaacacagca

SEQ ID NO: 19033 - RNA, 22 nt, synthetic construct
  source 1..22: mol_type = other RNA
agagttaagaagtctaggtctg

SEQ ID NO: 19034 - RNA, 22 nt, synthetic construct
  source 1..22: mol_type = other RNA
agatcaatgctaaatgaaatca

SEQ ID NO: 19035 - RNA, 22 nt, synthetic construct
  source 1..22: mol_type = other RNA
agatgaccacatatccattgtt

SEQ ID NO: 19036 - RNA, 22 nt, synthetic construct
  source 1..22: mol_type = other RNA
agatgatgtcttaatgtattgc

SEQ ID NO: 19037 - RNA, 22 nt, synthetic construct
  source 1..22: mol_type = other RNA
agattcaattctagtttggtcc

SEQ ID NO: 19038 - RNA, 22 nt, synthetic construct
  source 1..22: mol_type = other RNA
agcaaagttaaatacaatttca

SEQ ID NO: 19039 - RNA, 22 nt, synthetic construct
  source 1..22: mol_type = other RNA
agcaacgtggaactgttttctt

SEQ ID NO: 19040 - RNA, 22 nt, synthetic construct
  source 1..22: mol_type = other RNA
agcaactaacttaataggtaat

SEQ ID NO: 19041 - RNA, 22 nt, synthetic construct
  source 1..22: mol_type = other RNA
agcacatggtaaagagcctaga

SEQ ID NO: 19042 - RNA, 22 nt, synthetic construct
  source 1..22: mol_type = other RNA
agcagacctagacttcttaact

SEQ ID NO: 19043 - RNA, 22 nt, synthetic construct
  source 1..22: mol_type = other RNA
agcagcttgcccatcataagtt

SEQ ID NO: 19044 - RNA, 22 nt, synthetic construct
  source 1..22: mol_type = other RNA
agcatgggcaatacattaagac

SEQ ID NO: 19045 - RNA, 22 nt, synthetic construct
  source 1..22: mol_type = other RNA
agcattgaatgtgtagtttata

SEQ ID NO: 19046 - RNA, 22 nt, synthetic construct
  source 1..22: mol_type = other RNA
agcattgagagccgtaacacca

SEQ ID NO: 19047 - RNA, 22 nt, synthetic construct
  source 1..22: mol_type = other RNA
agcattgatctaactcaatgtg

SEQ ID NO: 19048 - RNA, 22 nt, synthetic construct
  source 1..22: mol_type = other RNA
agcccagtatttccagaccagc

SEQ ID NO: 19049 - RNA, 22 nt, synthetic construct
  source 1..22: mol_type = other RNA
agccgtaacaccacctgaggga

SEQ ID NO: 19050 - RNA, 22 nt, synthetic construct
  source 1..22: mol_type = other RNA
agccgtgttaacttgcacgaat

SEQ ID NO: 19051 - RNA, 22 nt, synthetic construct
  source 1..22: mol_type = other RNA
agcctagaacacagagacacag

SEQ ID NO: 19052 - RNA, 22 nt, synthetic construct
  source 1..22: mol_type = other RNA
agcctttctccactccctcagg

SEQ ID NO: 19053 - RNA, 22 nt, synthetic construct
  source 1..22: mol_type = other RNA
agctaacaaacttcagaaaaac

SEQ ID NO: 19054 - RNA, 22 nt, synthetic construct
  source 1..22: mol_type = other RNA
agctgcttgtgacattgaaggt

SEQ ID NO: 19055 - RNA, 22 nt, synthetic construct
  source 1..22: mol_type = other RNA
agcttagtaacaattttgataa

SEQ ID NO: 19056 - RNA, 22 nt, synthetic construct
  source 1..22: mol_type = other RNA
agcttgcccatcataagttttt

SEQ ID NO: 19057 - RNA, 22 nt, synthetic construct
  source 1..22: mol_type = other RNA
agcttttaaaaacaggtagtca

SEQ ID NO: 19058 - RNA, 22 nt, synthetic construct
  source 1..22: mol_type = other RNA
aggaacaatggatatgtggtca

SEQ ID NO: 19059 - RNA, 22 nt, synthetic construct
  source 1..22: mol_type = other RNA
aggaacacagcattgagagccg

SEQ ID NO: 19060 - RNA, 22 nt, synthetic construct
  source 1..22: mol_type = other RNA
aggaccaaactagaattgaatc

SEQ ID NO: 19061 - RNA, 22 nt, synthetic construct
  source 1..22: mol_type = other RNA
aggagcatataattatacattg

SEQ ID NO: 19062 - RNA, 22 nt, synthetic construct
  source 1..22: mol_type = other RNA
aggatggttaagacatataagg

SEQ ID NO: 19063 - RNA, 22 nt, synthetic construct
  source 1..22: mol_type = other RNA
aggccaaggtaaaagaattgct

SEQ ID NO: 19064 - RNA, 22 nt, synthetic construct
  source 1..22: mol_type = other RNA
aggctctttaccatgtgctcgt

SEQ ID NO: 19065 - RNA, 22 nt, synthetic construct
  source 1..22: mol_type = other RNA
aggcttcagagagaaagtgttt

SEQ ID NO: 19066 - RNA, 22 nt, synthetic construct
  source 1..22: mol_type = other RNA
agggagtgaaatgtctttaatg

SEQ ID NO: 19067 - RNA, 22 nt, synthetic construct
  source 1..22: mol_type = other RNA
agggagtggagaaaggcttcag

SEQ ID NO: 19068 - RNA, 22 nt, synthetic construct
  source 1..22: mol_type = other RNA
aggggaaaaaagtaatgaatta

SEQ ID NO: 19069 - RNA, 22 nt, synthetic construct
  source 1..22: mol_type = other RNA
aggtaaaagaattgcttgagcc

SEQ ID NO: 19070 - RNA, 22 nt, synthetic construct
  source 1..22: mol_type = other RNA
aggtaaggttggtaggtgaaca

SEQ ID NO: 19071 - RNA, 22 nt, synthetic construct
  source 1..22: mol_type = other RNA
aggtagtcaccatagcattgaa

SEQ ID NO: 19072 - RNA, 22 nt, synthetic construct
  source 1..22: mol_type = other RNA
aggtatttaagattcaattcta

SEQ ID NO: 19073 - RNA, 22 nt, synthetic construct
  source 1..22: mol_type = other RNA
aggtctgcttccagaagaaaac

SEQ ID NO: 19074 - RNA, 22 nt, synthetic construct
  source 1..22: mol_type = other RNA
aggtgaacatagttaatcatta

SEQ ID NO: 19075 - RNA, 22 nt, synthetic construct
  source 1..22: mol_type = other RNA
aggtggtgttacggctctcaat

SEQ ID NO: 19076 - RNA, 22 nt, synthetic construct
  source 1..22: mol_type = other RNA
aggttacattcgtgcaagttaa

SEQ ID NO: 19077 - RNA, 22 nt, synthetic construct
  source 1..22: mol_type = other RNA
aggttggtaggtgaacatagtt

SEQ ID NO: 19078 - RNA, 22 nt, synthetic construct
  source 1..22: mol_type = other RNA
agtaagtgtcattaaagacatt

SEQ ID NO: 19079 - RNA, 22 nt, synthetic construct
  source 1..22: mol_type = other RNA
agtaatgaattaagtatgcatt

SEQ ID NO: 19080 - RNA, 22 nt, synthetic construct
  source 1..22: mol_type = other RNA
agtacagtttgagaaatgcata

SEQ ID NO: 19081 - RNA, 22 nt, synthetic construct
  source 1..22: mol_type = other RNA
agtaccagaggaacacagcatt

SEQ ID NO: 19082 - RNA, 22 nt, synthetic construct
  source 1..22: mol_type = other RNA
agtatgcatttctcaaactgta

SEQ ID NO: 19083 - RNA, 22 nt, synthetic construct
  source 1..22: mol_type = other RNA
agtatttccagaccagcatggg

SEQ ID NO: 19084 - RNA, 22 nt, synthetic construct
  source 1..22: mol_type = other RNA
agtcaccatagcattgaatgtg

SEQ ID NO: 19085 - RNA, 22 nt, synthetic construct
  source 1..22: mol_type = other RNA
agtctaggtctgcttccagaag

SEQ ID NO: 19086 - RNA, 22 nt, synthetic construct
  source 1..22: mol_type = other RNA
agtgaaatgtctttaatgacac

SEQ ID NO: 19087 - RNA, 22 nt, synthetic construct
  source 1..22: mol_type = other RNA
agtgacaaaaaatgaggagcat

SEQ ID NO: 19088 - RNA, 22 nt, synthetic construct
  source 1..22: mol_type = other RNA
agtgatccattccaaaaaacac

SEQ ID NO: 19089 - RNA, 22 nt, synthetic construct
  source 1..22: mol_type = other RNA
agtggagaaaagggagtgaaat

SEQ ID NO: 19090 - RNA, 22 nt, synthetic construct
  source 1..22: mol_type = other RNA
agtggagaaaggcttcagagag

SEQ ID NO: 19091 - RNA, 22 nt, synthetic construct
  source 1..22: mol_type = other RNA
agtgtcattaaagacatttcac

SEQ ID NO: 19092 - RNA, 22 nt, synthetic construct
  source 1..22: mol_type = other RNA
agtgttttttggaatggatcac

SEQ ID NO: 19093 - RNA, 22 nt, synthetic construct
  source 1..22: mol_type = other RNA
agttaacacggcttaatgatta

SEQ ID NO: 19094 - RNA, 22 nt, synthetic construct
  source 1..22: mol_type = other RNA
agttaagaagtctaggtctgct

SEQ ID NO: 19095 - RNA, 22 nt, synthetic construct
  source 1..22: mol_type = other RNA
agttaatcattaagccgtgtta

SEQ ID NO: 19096 - RNA, 22 nt, synthetic construct
  source 1..22: mol_type = other RNA
agttagatcaatgctaaatgaa

SEQ ID NO: 19097 - RNA, 22 nt, synthetic construct
  source 1..22: mol_type = other RNA
agttagttgctcatttctttga

SEQ ID NO: 19098 - RNA, 22 nt, synthetic construct
  source 1..22: mol_type = other RNA
agttccacgttgcttgaaattg

SEQ ID NO: 19099 - RNA, 22 nt, synthetic construct
  source 1..22: mol_type = other RNA
agttcttttggaaacagtgatc

SEQ ID NO: 19100 - RNA, 22 nt, synthetic construct
  source 1..22: mol_type = other RNA
agttgaggggaaaaaagtaatg

SEQ ID NO: 19101 - RNA, 22 nt, synthetic construct
  source 1..22: mol_type = other RNA
agttgctcatttctttgatttc

SEQ ID NO: 19102 - RNA, 22 nt, synthetic construct
  source 1..22: mol_type = other RNA
agtttataatacagcaaagtta

SEQ ID NO: 19103 - RNA, 22 nt, synthetic construct
  source 1..22: mol_type = other RNA
agtttgagaaatgcatacttaa

SEQ ID NO: 19104 - RNA, 22 nt, synthetic construct
  source 1..22: mol_type = other RNA
agtttggtcctagatgaccaca

SEQ ID NO: 19105 - RNA, 22 nt, synthetic construct
  source 1..22: mol_type = other RNA
agtttgttagcttagtaacaat

SEQ ID NO: 19106 - RNA, 22 nt, synthetic construct
  source 1..22: mol_type = other RNA
agtttttctgaagtttgttagc

SEQ ID NO: 19107 - RNA, 22 nt, synthetic construct
  source 1..22: mol_type = other RNA
ataaactacacattcaatgcta

SEQ ID NO: 19108 - RNA, 22 nt, synthetic construct
  source 1..22: mol_type = other RNA
ataaacttttttgttgggtaaa

SEQ ID NO: 19109 - RNA, 22 nt, synthetic construct
  source 1..22: mol_type = other RNA
ataaatttacccaacaaaaaag

SEQ ID NO: 19110 - RNA, 22 nt, synthetic construct
  source 1..22: mol_type = other RNA
ataagtttttctgaagtttgtt

SEQ ID NO: 19111 - RNA, 22 nt, synthetic construct
  source 1..22: mol_type = other RNA
ataatacagcaaagttaaatac

SEQ ID NO: 19112 - RNA, 22 nt, synthetic construct
  source 1..22: mol_type = other RNA
ataattatatgctcctcatttt

SEQ ID NO: 19113 - RNA, 22 nt, synthetic construct
  source 1..22: mol_type = other RNA
atacaaggatggttaagacata

SEQ ID NO: 19114 - RNA, 22 nt, synthetic construct
  source 1..22: mol_type = other RNA
atacagagtaccagaggaacac

SEQ ID NO: 19115 - RNA, 22 nt, synthetic construct
  source 1..22: mol_type = other RNA
atacagcaaagttaaatacaat

SEQ ID NO: 19116 - RNA, 22 nt, synthetic construct
  source 1..22: mol_type = other RNA
atacattaagacatcatcttta

SEQ ID NO: 19117 - RNA, 22 nt, synthetic construct
  source 1..22: mol_type = other RNA
atacattgatttatacagagta

SEQ ID NO: 19118 - RNA, 22 nt, synthetic construct
  source 1..22: mol_type = other RNA
atacatttaacaaaaagaggag

SEQ ID NO: 19119 - RNA, 22 nt, synthetic construct
  source 1..22: mol_type = other RNA
ataccaatatttgcccagaaaa

SEQ ID NO: 19120 - RNA, 22 nt, synthetic construct
  source 1..22: mol_type = other RNA
ataccttcaatgtcacaagcag

SEQ ID NO: 19121 - RNA, 22 nt, synthetic construct
  source 1..22: mol_type = other RNA
atactgggctcaagcaattctt

SEQ ID NO: 19122 - RNA, 22 nt, synthetic construct
  source 1..22: mol_type = other RNA
atagagttaagaagtctaggtc

SEQ ID NO: 19123 - RNA, 22 nt, synthetic construct
  source 1..22: mol_type = other RNA
atagcattgaatgtgtagttta

SEQ ID NO: 19124 - RNA, 22 nt, synthetic construct
  source 1..22: mol_type = other RNA
atagtaagtgtcattaaagaca

SEQ ID NO: 19125 - RNA, 22 nt, synthetic construct
  source 1..22: mol_type = other RNA
atagtgacaaaaaatgaggagc

SEQ ID NO: 19126 - RNA, 22 nt, synthetic construct
  source 1..22: mol_type = other RNA
atagttaatcattaagccgtgt

SEQ ID NO: 19127 - RNA, 22 nt, synthetic construct
  source 1..22: mol_type = other RNA
atatacaaggatggttaagaca

SEQ ID NO: 19128 - RNA, 22 nt, synthetic construct
  source 1..22: mol_type = other RNA
atatacatttaacaaaaagagg

SEQ ID NO: 19129 - RNA, 22 nt, synthetic construct
  source 1..22: mol_type = other RNA
atataccaatatttgcccagaa

SEQ ID NO: 19130 - RNA, 22 nt, synthetic construct
  source 1..22: mol_type = other RNA
atatagagttaagaagtctagg

SEQ ID NO: 19131 - RNA, 22 nt, synthetic construct
  source 1..22: mol_type = other RNA
atatagtaagtgtcattaaaga

SEQ ID NO: 19132 - RNA, 22 nt, synthetic construct
  source 1..22: mol_type = other RNA
atatataccaatatttgcccag

SEQ ID NO: 19133 - RNA, 22 nt, synthetic construct
  source 1..22: mol_type = other RNA
atatatagagttaagaagtcta

SEQ ID NO: 19134 - RNA, 22 nt, synthetic construct
  source 1..22: mol_type = other RNA
atatatgggattttgtgacaat

SEQ ID NO: 19135 - RNA, 22 nt, synthetic construct
  source 1..22: mol_type = other RNA
atatccattgttccttcaacga

SEQ ID NO: 19136 - RNA, 22 nt, synthetic construct
  source 1..22: mol_type = other RNA
atatgctcctcattttttgtca

SEQ ID NO: 19137 - RNA, 22 nt, synthetic construct
  source 1..22: mol_type = other RNA
atatgggattttgtgacaatat

SEQ ID NO: 19138 - RNA, 22 nt, synthetic construct
  source 1..22: mol_type = other RNA
atatgtcttaaccatccttgta

SEQ ID NO: 19139 - RNA, 22 nt, synthetic construct
  source 1..22: mol_type = other RNA
atatgtggtcatctaggaccaa

SEQ ID NO: 19140 - RNA, 22 nt, synthetic construct
  source 1..22: mol_type = other RNA
atattgtcacaaaatcccatat

SEQ ID NO: 19141 - RNA, 22 nt, synthetic construct
  source 1..22: mol_type = other RNA
atatttgcccagaaaaggtaag

SEQ ID NO: 19142 - RNA, 22 nt, synthetic construct
  source 1..22: mol_type = other RNA
atcaaaattgttactaagctaa

SEQ ID NO: 19143 - RNA, 22 nt, synthetic construct
  source 1..22: mol_type = other RNA
atcaaagaaatgagcaactaac

SEQ ID NO: 19144 - RNA, 22 nt, synthetic construct
  source 1..22: mol_type = other RNA
atcaatgctaaatgaaatcaaa

SEQ ID NO: 19145 - RNA, 22 nt, synthetic construct
  source 1..22: mol_type = other RNA
atcaatgtataattatatgctc

SEQ ID NO: 19146 - RNA, 22 nt, synthetic construct
  source 1..22: mol_type = other RNA
atcaccttatatgtcttaacca

SEQ ID NO: 19147 - RNA, 22 nt, synthetic construct
  source 1..22: mol_type = other RNA
atcactgtttccaaaagaacta

SEQ ID NO: 19148 - RNA, 22 nt, synthetic construct
  source 1..22: mol_type = other RNA
atcataagtttttctgaagttt

SEQ ID NO: 19149 - RNA, 22 nt, synthetic construct
  source 1..22: mol_type = other RNA
atcattaagccgtgttaacttg

SEQ ID NO: 19150 - RNA, 22 nt, synthetic construct
  source 1..22: mol_type = other RNA
atccattccaaaaaacactttc

SEQ ID NO: 19151 - RNA, 22 nt, synthetic construct
  source 1..22: mol_type = other RNA
atccattgttccttcaacgagc

SEQ ID NO: 19152 - RNA, 22 nt, synthetic construct
  source 1..22: mol_type = other RNA
atcccatatatagtaagtgtca

SEQ ID NO: 19153 - RNA, 22 nt, synthetic construct
  source 1..22: mol_type = other RNA
atccttgtatattgtcacaaaa

SEQ ID NO: 19154 - RNA, 22 nt, synthetic construct
  source 1..22: mol_type = other RNA
atctaactcaatgtggaagaag

SEQ ID NO: 19155 - RNA, 22 nt, synthetic construct
  source 1..22: mol_type = other RNA
atctaggaccaaactagaattg

SEQ ID NO: 19156 - RNA, 22 nt, synthetic construct
  source 1..22: mol_type = other RNA
atctcctctttttgttaaatgt

SEQ ID NO: 19157 - RNA, 22 nt, synthetic construct
  source 1..22: mol_type = other RNA
atcttaaataccttcaatgtca

SEQ ID NO: 19158 - RNA, 22 nt, synthetic construct
  source 1..22: mol_type = other RNA
atcttgattttcaatttcaagc

SEQ ID NO: 19159 - RNA, 22 nt, synthetic construct
  source 1..22: mol_type = other RNA
atgaaatcaaagaaatgagcaa

SEQ ID NO: 19160 - RNA, 22 nt, synthetic construct
  source 1..22: mol_type = other RNA
atgaattaagtatgcatttctc

SEQ ID NO: 19161 - RNA, 22 nt, synthetic construct
  source 1..22: mol_type = other RNA
atgacacttactatatatggga

SEQ ID NO: 19162 - RNA, 22 nt, synthetic construct
  source 1..22: mol_type = other RNA
atgaccacatatccattgttcc

SEQ ID NO: 19163 - RNA, 22 nt, synthetic construct
  source 1..22: mol_type = other RNA
atgagcaactaacttaataggt

SEQ ID NO: 19164 - RNA, 22 nt, synthetic construct
  source 1..22: mol_type = other RNA
atgaggagcatataattataca

SEQ ID NO: 19165 - RNA, 22 nt, synthetic construct
  source 1..22: mol_type = other RNA
atgatgggcaagctgcttgtga

SEQ ID NO: 19166 - RNA, 22 nt, synthetic construct
  source 1..22: mol_type = other RNA
atgatgtcttaatgtattgccc

SEQ ID NO: 19167 - RNA, 22 nt, synthetic construct
  source 1..22: mol_type = other RNA
atgattaactatgttcacctac

SEQ ID NO: 19168 - RNA, 22 nt, synthetic construct
  source 1..22: mol_type = other RNA
atgattttaagagatttacaag

SEQ ID NO: 19169 - RNA, 22 nt, synthetic construct
  source 1..22: mol_type = other RNA
atgcatacttaattcattactt

SEQ ID NO: 19170 - RNA, 22 nt, synthetic construct
  source 1..22: mol_type = other RNA
atgcatttctcaaactgtactt

SEQ ID NO: 19171 - RNA, 22 nt, synthetic construct
  source 1..22: mol_type = other RNA
atgctaaatgaaatcaaagaaa

SEQ ID NO: 19172 - RNA, 22 nt, synthetic construct
  source 1..22: mol_type = other RNA
atgctatggtgactacctgttt

SEQ ID NO: 19173 - RNA, 22 nt, synthetic construct
  source 1..22: mol_type = other RNA
atgctcctcattttttgtcact

SEQ ID NO: 19174 - RNA, 22 nt, synthetic construct
  source 1..22: mol_type = other RNA
atgctggtctggaaatactggg

SEQ ID NO: 19175 - RNA, 22 nt, synthetic construct
  source 1..22: mol_type = other RNA
atgctgtgttcctctggtactc

SEQ ID NO: 19176 - RNA, 22 nt, synthetic construct
  source 1..22: mol_type = other RNA
atggatatgtggtcatctagga

SEQ ID NO: 19177 - RNA, 22 nt, synthetic construct
  source 1..22: mol_type = other RNA
atggatcactgtttccaaaaga

SEQ ID NO: 19178 - RNA, 22 nt, synthetic construct
  source 1..22: mol_type = other RNA
atgggattttgtgacaatatac

SEQ ID NO: 19179 - RNA, 22 nt, synthetic construct
  source 1..22: mol_type = other RNA
atgggcaagctgcttgtgacat

SEQ ID NO: 19180 - RNA, 22 nt, synthetic construct
  source 1..22: mol_type = other RNA
atgggcaatacattaagacatc

SEQ ID NO: 19181 - RNA, 22 nt, synthetic construct
  source 1..22: mol_type = other RNA
atggtaaagagcctagaacaca

SEQ ID NO: 19182 - RNA, 22 nt, synthetic construct
  source 1..22: mol_type = other RNA
atggtgactacctgtttttaaa

SEQ ID NO: 19183 - RNA, 22 nt, synthetic construct
  source 1..22: mol_type = other RNA
atggttaagacatataaggtga

SEQ ID NO: 19184 - RNA, 22 nt, synthetic construct
  source 1..22: mol_type = other RNA
atgtaaccttcttccacattga

SEQ ID NO: 19185 - RNA, 22 nt, synthetic construct
  source 1..22: mol_type = other RNA
atgtataattatatgctcctca

SEQ ID NO: 19186 - RNA, 22 nt, synthetic construct
  source 1..22: mol_type = other RNA
atgtattgcccatgctggtctg

SEQ ID NO: 19187 - RNA, 22 nt, synthetic construct
  source 1..22: mol_type = other RNA
atgtcacaagcagcttgcccat

SEQ ID NO: 19188 - RNA, 22 nt, synthetic construct
  source 1..22: mol_type = other RNA
atgtcttaaccatccttgtata

SEQ ID NO: 19189 - RNA, 22 nt, synthetic construct
  source 1..22: mol_type = other RNA
atgtcttaatgtattgcccatg

SEQ ID NO: 19190 - RNA, 22 nt, synthetic construct
  source 1..22: mol_type = other RNA
atgtctttaatgacacttacta

SEQ ID NO: 19191 - RNA, 22 nt, synthetic construct
  source 1..22: mol_type = other RNA
atgtgctcgttgaaggaacaat

SEQ ID NO: 19192 - RNA, 22 nt, synthetic construct
  source 1..22: mol_type = other RNA
atgtggaagaaggttacattcg

SEQ ID NO: 19193 - RNA, 22 nt, synthetic construct
  source 1..22: mol_type = other RNA
atgtggtcatctaggaccaaac

SEQ ID NO: 19194 - RNA, 22 nt, synthetic construct
  source 1..22: mol_type = other RNA
atgtgtagtttataatacagca

SEQ ID NO: 19195 - RNA, 22 nt, synthetic construct
  source 1..22: mol_type = other RNA
atgttattaatctcctcttttt

SEQ ID NO: 19196 - RNA, 22 nt, synthetic construct
  source 1..22: mol_type = other RNA
atgttcacctaccaaccttacc

SEQ ID NO: 19197 - RNA, 22 nt, synthetic construct
  source 1..22: mol_type = other RNA
attaaagacatttcactccctt

SEQ ID NO: 19198 - RNA, 22 nt, synthetic construct
  source 1..22: mol_type = other RNA
attaaagttgaggggaaaaaag

SEQ ID NO: 19199 - RNA, 22 nt, synthetic construct
  source 1..22: mol_type = other RNA
attaactatgttcacctaccaa

SEQ ID NO: 19200 - RNA, 22 nt, synthetic construct
  source 1..22: mol_type = other RNA
attaagccgtgttaacttgcac

SEQ ID NO: 19201 - RNA, 22 nt, synthetic construct
  source 1..22: mol_type = other RNA
attaagtatgcatttctcaaac

SEQ ID NO: 19202 - RNA, 22 nt, synthetic construct
  source 1..22: mol_type = other RNA
attaagttagttgctcatttct

SEQ ID NO: 19203 - RNA, 22 nt, synthetic construct
  source 1..22: mol_type = other RNA
attaatctcctctttttgttaa

SEQ ID NO: 19204 - RNA, 22 nt, synthetic construct
  source 1..22: mol_type = other RNA
attacctattaagttagttgct

SEQ ID NO: 19205 - RNA, 22 nt, synthetic construct
  source 1..22: mol_type = other RNA
attacttttttcccctcaactt

SEQ ID NO: 19206 - RNA, 22 nt, synthetic construct
  source 1..22: mol_type = other RNA
attagcttttaaaaacaggtag

SEQ ID NO: 19207 - RNA, 22 nt, synthetic construct
  source 1..22: mol_type = other RNA
attataaactacacattcaatg

SEQ ID NO: 19208 - RNA, 22 nt, synthetic construct
  source 1..22: mol_type = other RNA
attatagtgacaaaaaatgagg

SEQ ID NO: 19209 - RNA, 22 nt, synthetic construct
  source 1..22: mol_type = other RNA
attatatgctcctcattttttg

SEQ ID NO: 19210 - RNA, 22 nt, synthetic construct
  source 1..22: mol_type = other RNA
attatcaaaattgttactaagc

SEQ ID NO: 19211 - RNA, 22 nt, synthetic construct
  source 1..22: mol_type = other RNA
attattaaagttgaggggaaaa

SEQ ID NO: 19212 - RNA, 22 nt, synthetic construct
  source 1..22: mol_type = other RNA
attcaatgctatggtgactacc

SEQ ID NO: 19213 - RNA, 22 nt, synthetic construct
  source 1..22: mol_type = other RNA
attcaattctagtttggtccta

SEQ ID NO: 19214 - RNA, 22 nt, synthetic construct
  source 1..22: mol_type = other RNA
attcattacttttttcccctca

SEQ ID NO: 19215 - RNA, 22 nt, synthetic construct
  source 1..22: mol_type = other RNA
attccaaaaaacactttctctc

SEQ ID NO: 19216 - RNA, 22 nt, synthetic construct
  source 1..22: mol_type = other RNA
attcgtgcaagttaacacggct

SEQ ID NO: 19217 - RNA, 22 nt, synthetic construct
  source 1..22: mol_type = other RNA
attctagtttggtcctagatga

SEQ ID NO: 19218 - RNA, 22 nt, synthetic construct
  source 1..22: mol_type = other RNA
attgaaggtatttaagattcaa

SEQ ID NO: 19219 - RNA, 22 nt, synthetic construct
  source 1..22: mol_type = other RNA
attgaatcttaaataccttcaa

SEQ ID NO: 19220 - RNA, 22 nt, synthetic construct
  source 1..22: mol_type = other RNA
attgagagccgtaacaccacct

SEQ ID NO: 19221 - RNA, 22 nt, synthetic construct
  source 1..22: mol_type = other RNA
attgagttagatcaatgctaaa

SEQ ID NO: 19222 - RNA, 22 nt, synthetic construct
  source 1..22: mol_type = other RNA
attgatctaactcaatgtggaa

SEQ ID NO: 19223 - RNA, 22 nt, synthetic construct
  source 1..22: mol_type = other RNA
attgatttatacagagtaccag

SEQ ID NO: 19224 - RNA, 22 nt, synthetic construct
  source 1..22: mol_type = other RNA
attgcccatgctggtctggaaa

SEQ ID NO: 19225 - RNA, 22 nt, synthetic construct
  source 1..22: mol_type = other RNA
attgcttgagcccagtatttcc

SEQ ID NO: 19226 - RNA, 22 nt, synthetic construct
  source 1..22: mol_type = other RNA
attggtatatatagagttaaga

SEQ ID NO: 19227 - RNA, 22 nt, synthetic construct
  source 1..22: mol_type = other RNA
attgtatttaactttgctgtat

SEQ ID NO: 19228 - RNA, 22 nt, synthetic construct
  source 1..22: mol_type = other RNA
attgtcacaaaatcccatatat

SEQ ID NO: 19229 - RNA, 22 nt, synthetic construct
  source 1..22: mol_type = other RNA
attgttactaagctaacaaact

SEQ ID NO: 19230 - RNA, 22 nt, synthetic construct
  source 1..22: mol_type = other RNA
attgttccttcaacgagcacat

SEQ ID NO: 19231 - RNA, 22 nt, synthetic construct
  source 1..22: mol_type = other RNA
atttaacaaaaagaggagatta

SEQ ID NO: 19232 - RNA, 22 nt, synthetic construct
  source 1..22: mol_type = other RNA
atttacccaacaaaaaagttta

SEQ ID NO: 19233 - RNA, 22 nt, synthetic construct
  source 1..22: mol_type = other RNA
atttagcattgatctaactcaa

SEQ ID NO: 19234 - RNA, 22 nt, synthetic construct
  source 1..22: mol_type = other RNA
atttatacagagtaccagagga

SEQ ID NO: 19235 - RNA, 22 nt, synthetic construct
  source 1..22: mol_type = other RNA
atttattattaaagttgagggg

SEQ ID NO: 19236 - RNA, 22 nt, synthetic construct
  source 1..22: mol_type = other RNA
atttcaagcaacgtggaactgt

SEQ ID NO: 19237 - RNA, 22 nt, synthetic construct
  source 1..22: mol_type = other RNA
atttcactcccttttctccact

SEQ ID NO: 19238 - RNA, 22 nt, synthetic construct
  source 1..22: mol_type = other RNA
atttcatttagcattgatctaa

SEQ ID NO: 19239 - RNA, 22 nt, synthetic construct
  source 1..22: mol_type = other RNA
atttccagaccagcatgggcaa

SEQ ID NO: 19240 - RNA, 22 nt, synthetic construct
  source 1..22: mol_type = other RNA
atttctcaaactgtactttagt

SEQ ID NO: 19241 - RNA, 22 nt, synthetic construct
  source 1..22: mol_type = other RNA
atttctttgatttcatttagca

SEQ ID NO: 19242 - RNA, 22 nt, synthetic construct
  source 1..22: mol_type = other RNA
atttgcccagaaaaggtaaggt

SEQ ID NO: 19243 - RNA, 22 nt, synthetic construct
  source 1..22: mol_type = other RNA
attttaagagatttacaagtca

SEQ ID NO: 19244 - RNA, 22 nt, synthetic construct
  source 1..22: mol_type = other RNA
attttcaatttcaagcaacgtg

SEQ ID NO: 19245 - RNA, 22 nt, synthetic construct
  source 1..22: mol_type = other RNA
attttgtgacaatatacaagga

SEQ ID NO: 19246 - RNA, 22 nt, synthetic construct
  source 1..22: mol_type = other RNA
atttttgacttgtaaatctctt

SEQ ID NO: 19247 - RNA, 22 nt, synthetic construct
  source 1..22: mol_type = other RNA
caaaaaacactttctctctgaa

SEQ ID NO: 19248 - RNA, 22 nt, synthetic construct
  source 1..22: mol_type = other RNA
caaaaaatgaggagcatataat

SEQ ID NO: 19249 - RNA, 22 nt, synthetic construct
  source 1..22: mol_type = other RNA
caaaaagaggagattaataaca

SEQ ID NO: 19250 - RNA, 22 nt, synthetic construct
  source 1..22: mol_type = other RNA
caaaaataaacttttttgttgg

SEQ ID NO: 19251 - RNA, 22 nt, synthetic construct
  source 1..22: mol_type = other RNA
caaaagaactaaagtacagttt

SEQ ID NO: 19252 - RNA, 22 nt, synthetic construct
  source 1..22: mol_type = other RNA
caaaatcccatatatagtaagt

SEQ ID NO: 19253 - RNA, 22 nt, synthetic construct
  source 1..22: mol_type = other RNA
caaaattgttactaagctaaca

SEQ ID NO: 19254 - RNA, 22 nt, synthetic construct
  source 1..22: mol_type = other RNA
caaactagaattgaatcttaaa

SEQ ID NO: 19255 - RNA, 22 nt, synthetic construct
  source 1..22: mol_type = other RNA
caaactgtactttagttctttt

SEQ ID NO: 19256 - RNA, 22 nt, synthetic construct
  source 1..22: mol_type = other RNA
caaacttcagaaaaacttatga

SEQ ID NO: 19257 - RNA, 22 nt, synthetic construct
  source 1..22: mol_type = other RNA
caaagaaatgagcaactaactt

SEQ ID NO: 19258 - RNA, 22 nt, synthetic construct
  source 1..22: mol_type = other RNA
caaatattggtatatatagagt

SEQ ID NO: 19259 - RNA, 22 nt, synthetic construct
  source 1..22: mol_type = other RNA
caaattacctattaagttagtt

SEQ ID NO: 19260 - RNA, 22 nt, synthetic construct
  source 1..22: mol_type = other RNA
caaccttaccttttctgggcaa

SEQ ID NO: 19261 - RNA, 22 nt, synthetic construct
  source 1..22: mol_type = other RNA
caacgagcacatggtaaagagc

SEQ ID NO: 19262 - RNA, 22 nt, synthetic construct
  source 1..22: mol_type = other RNA
caacgtggaactgttttcttct

SEQ ID NO: 19263 - RNA, 22 nt, synthetic construct
  source 1..22: mol_type = other RNA
caactaacttaataggtaattt

SEQ ID NO: 19264 - RNA, 22 nt, synthetic construct
  source 1..22: mol_type = other RNA
caagcaacgtggaactgttttc

SEQ ID NO: 19265 - RNA, 22 nt, synthetic construct
  source 1..22: mol_type = other RNA
caagcagcttgcccatcataag

SEQ ID NO: 19266 - RNA, 22 nt, synthetic construct
  source 1..22: mol_type = other RNA
caagctgcttgtgacattgaag

SEQ ID NO: 19267 - RNA, 22 nt, synthetic construct
  source 1..22: mol_type = other RNA
caaggatggttaagacatataa

SEQ ID NO: 19268 - RNA, 22 nt, synthetic construct
  source 1..22: mol_type = other RNA
caaggtaaaagaattgcttgag

SEQ ID NO: 19269 - RNA, 22 nt, synthetic construct
  source 1..22: mol_type = other RNA
caagttaacacggcttaatgat

SEQ ID NO: 19270 - RNA, 22 nt, synthetic construct
  source 1..22: mol_type = other RNA
caatacattaagacatcatctt

SEQ ID NO: 19271 - RNA, 22 nt, synthetic construct
  source 1..22: mol_type = other RNA
caatatacaaggatggttaaga

SEQ ID NO: 19272 - RNA, 22 nt, synthetic construct
  source 1..22: mol_type = other RNA
caatatttgcccagaaaaggta

SEQ ID NO: 19273 - RNA, 22 nt, synthetic construct
  source 1..22: mol_type = other RNA
caatgctaaatgaaatcaaaga

SEQ ID NO: 19274 - RNA, 22 nt, synthetic construct
  source 1..22: mol_type = other RNA
caatgctatggtgactacctgt

SEQ ID NO: 19275 - RNA, 22 nt, synthetic construct
  source 1..22: mol_type = other RNA
caatgctgtgttcctctggtac

SEQ ID NO: 19276 - RNA, 22 nt, synthetic construct
  source 1..22: mol_type = other RNA
caatggatatgtggtcatctag

SEQ ID NO: 19277 - RNA, 22 nt, synthetic construct
  source 1..22: mol_type = other RNA
caatgtataattatatgctcct

SEQ ID NO: 19278 - RNA, 22 nt, synthetic construct
  source 1..22: mol_type = other RNA
caatgtcacaagcagcttgccc

SEQ ID NO: 19279 - RNA, 22 nt, synthetic construct
  source 1..22: mol_type = other RNA
caatgtggaagaaggttacatt

SEQ ID NO: 19280 - RNA, 22 nt, synthetic construct
  source 1..22: mol_type = other RNA
caattatagtgacaaaaaatga

SEQ ID NO: 19281 - RNA, 22 nt, synthetic construct
  source 1..22: mol_type = other RNA
caattctagtttggtcctagat

SEQ ID NO: 19282 - RNA, 22 nt, synthetic construct
  source 1..22: mol_type = other RNA
caatttcaaattacctattaag

SEQ ID NO: 19283 - RNA, 22 nt, synthetic construct
  source 1..22: mol_type = other RNA
caatttcaagcaacgtggaact

SEQ ID NO: 19284 - RNA, 22 nt, synthetic construct
  source 1..22: mol_type = other RNA
cacaaaatcccatatatagtaa

SEQ ID NO: 19285 - RNA, 22 nt, synthetic construct
  source 1..22: mol_type = other RNA
cacaagcagcttgcccatcata

SEQ ID NO: 19286 - RNA, 22 nt, synthetic construct
  source 1..22: mol_type = other RNA
cacagaacacagtggagaaaag

SEQ ID NO: 19287 - RNA, 22 nt, synthetic construct
  source 1..22: mol_type = other RNA
cacagagacacagaacacagtg

SEQ ID NO: 19288 - RNA, 22 nt, synthetic construct
  source 1..22: mol_type = other RNA
cacagcattgagagccgtaaca

SEQ ID NO: 19289 - RNA, 22 nt, synthetic construct
  source 1..22: mol_type = other RNA
cacagtggagaaaagggagtga

SEQ ID NO: 19290 - RNA, 22 nt, synthetic construct
  source 1..22: mol_type = other RNA
cacatatccattgttccttcaa

SEQ ID NO: 19291 - RNA, 22 nt, synthetic construct
  source 1..22: mol_type = other RNA
cacatggtaaagagcctagaac

SEQ ID NO: 19292 - RNA, 22 nt, synthetic construct
  source 1..22: mol_type = other RNA
cacattcaatgctatggtgact

SEQ ID NO: 19293 - RNA, 22 nt, synthetic construct
  source 1..22: mol_type = other RNA
cacattgagttagatcaatgct

SEQ ID NO: 19294 - RNA, 22 nt, synthetic construct
  source 1..22: mol_type = other RNA
caccacctgagggagtggagaa

SEQ ID NO: 19295 - RNA, 22 nt, synthetic construct
  source 1..22: mol_type = other RNA
caccatagcattgaatgtgtag

SEQ ID NO: 19296 - RNA, 22 nt, synthetic construct
  source 1..22: mol_type = other RNA
cacctaccaaccttaccttttc

SEQ ID NO: 19297 - RNA, 22 nt, synthetic construct
  source 1..22: mol_type = other RNA
cacctgagggagtggagaaagg

SEQ ID NO: 19298 - RNA, 22 nt, synthetic construct
  source 1..22: mol_type = other RNA
caccttatatgtcttaaccatc

SEQ ID NO: 19299 - RNA, 22 nt, synthetic construct
  source 1..22: mol_type = other RNA
cacgaatgtaaccttcttccac

SEQ ID NO: 19300 - RNA, 22 nt, synthetic construct
  source 1..22: mol_type = other RNA
cacggcttaatgattaactatg

SEQ ID NO: 19301 - RNA, 22 nt, synthetic construct
  source 1..22: mol_type = other RNA
cacgttgcttgaaattgaaaat

SEQ ID NO: 19302 - RNA, 22 nt, synthetic construct
  source 1..22: mol_type = other RNA
cactccctcaggtggtgttacg

SEQ ID NO: 19303 - RNA, 22 nt, synthetic construct
  source 1..22: mol_type = other RNA
cactcccttttctccactgtgt

SEQ ID NO: 19304 - RNA, 22 nt, synthetic construct
  source 1..22: mol_type = other RNA
cactgtgttctgtgtctctgtg

SEQ ID NO: 19305 - RNA, 22 nt, synthetic construct
  source 1..22: mol_type = other RNA
cactgtttccaaaagaactaaa

SEQ ID NO: 19306 - RNA, 22 nt, synthetic construct
  source 1..22: mol_type = other RNA
cacttactatatatgggatttt

SEQ ID NO: 19307 - RNA, 22 nt, synthetic construct
  source 1..22: mol_type = other RNA
cactttctctctgaagcctttc

SEQ ID NO: 19308 - RNA, 22 nt, synthetic construct
  source 1..22: mol_type = other RNA
cagaaaaacttatgatgggcaa

SEQ ID NO: 19309 - RNA, 22 nt, synthetic construct
  source 1..22: mol_type = other RNA
cagaaaaggtaaggttggtagg

SEQ ID NO: 19310 - RNA, 22 nt, synthetic construct
  source 1..22: mol_type = other RNA
cagaacacagtggagaaaaggg

SEQ ID NO: 19311 - RNA, 22 nt, synthetic construct
  source 1..22: mol_type = other RNA
cagaagaaaacagttccacgtt

SEQ ID NO: 19312 - RNA, 22 nt, synthetic construct
  source 1..22: mol_type = other RNA
cagaccagcatgggcaatacat

SEQ ID NO: 19313 - RNA, 22 nt, synthetic construct
  source 1..22: mol_type = other RNA
cagacctagacttcttaactct

SEQ ID NO: 19314 - RNA, 22 nt, synthetic construct
  source 1..22: mol_type = other RNA
cagagacacagaacacagtgga

SEQ ID NO: 19315 - RNA, 22 nt, synthetic construct
  source 1..22: mol_type = other RNA
cagagagaaagtgttttttgga

SEQ ID NO: 19316 - RNA, 22 nt, synthetic construct
  source 1..22: mol_type = other RNA
cagaggaacacagcattgagag

SEQ ID NO: 19317 - RNA, 22 nt, synthetic construct
  source 1..22: mol_type = other RNA
cagagtaccagaggaacacagc

SEQ ID NO: 19318 - RNA, 22 nt, synthetic construct
  source 1..22: mol_type = other RNA
cagcaaagttaaatacaatttc

SEQ ID NO: 19319 - RNA, 22 nt, synthetic construct
  source 1..22: mol_type = other RNA
cagcatgggcaatacattaaga

SEQ ID NO: 19320 - RNA, 22 nt, synthetic construct
  source 1..22: mol_type = other RNA
cagcattgagagccgtaacacc

SEQ ID NO: 19321 - RNA, 22 nt, synthetic construct
  source 1..22: mol_type = other RNA
cagcttgcccatcataagtttt

SEQ ID NO: 19322 - RNA, 22 nt, synthetic construct
  source 1..22: mol_type = other RNA
caggtagtcaccatagcattga

SEQ ID NO: 19323 - RNA, 22 nt, synthetic construct
  source 1..22: mol_type = other RNA
caggtggtgttacggctctcaa

SEQ ID NO: 19324 - RNA, 22 nt, synthetic construct
  source 1..22: mol_type = other RNA
cagtatttccagaccagcatgg

SEQ ID NO: 19325 - RNA, 22 nt, synthetic construct
  source 1..22: mol_type = other RNA
cagtgatccattccaaaaaaca

SEQ ID NO: 19326 - RNA, 22 nt, synthetic construct
  source 1..22: mol_type = other RNA
cagtggagaaaagggagtgaaa

SEQ ID NO: 19327 - RNA, 22 nt, synthetic construct
  source 1..22: mol_type = other RNA
cagttccacgttgcttgaaatt

SEQ ID NO: 19328 - RNA, 22 nt, synthetic construct
  source 1..22: mol_type = other RNA
cagtttgagaaatgcatactta

SEQ ID NO: 19329 - RNA, 22 nt, synthetic construct
  source 1..22: mol_type = other RNA
cataagtttttctgaagtttgt

SEQ ID NO: 19330 - RNA, 22 nt, synthetic construct
  source 1..22: mol_type = other RNA
catagcattgaatgtgtagttt

SEQ ID NO: 19331 - RNA, 22 nt, synthetic construct
  source 1..22: mol_type = other RNA
catagttaatcattaagccgtg

SEQ ID NO: 19332 - RNA, 22 nt, synthetic construct
  source 1..22: mol_type = other RNA
catatatagtaagtgtcattaa

SEQ ID NO: 19333 - RNA, 22 nt, synthetic construct
  source 1..22: mol_type = other RNA
catatccattgttccttcaacg

SEQ ID NO: 19334 - RNA, 22 nt, synthetic construct
  source 1..22: mol_type = other RNA
catattaacaattatagtgaca

SEQ ID NO: 19335 - RNA, 22 nt, synthetic construct
  source 1..22: mol_type = other RNA
catcaccttatatgtcttaacc

SEQ ID NO: 19336 - RNA, 22 nt, synthetic construct
  source 1..22: mol_type = other RNA
catcataagtttttctgaagtt

SEQ ID NO: 19337 - RNA, 22 nt, synthetic construct
  source 1..22: mol_type = other RNA
catccttgtatattgtcacaaa

SEQ ID NO: 19338 - RNA, 22 nt, synthetic construct
  source 1..22: mol_type = other RNA
catctaggaccaaactagaatt

SEQ ID NO: 19339 - RNA, 22 nt, synthetic construct
  source 1..22: mol_type = other RNA
catgctggtctggaaatactgg

SEQ ID NO: 19340 - RNA, 22 nt, synthetic construct
  source 1..22: mol_type = other RNA
catgggcaatacattaagacat

SEQ ID NO: 19341 - RNA, 22 nt, synthetic construct
  source 1..22: mol_type = other RNA
catggtaaagagcctagaacac

SEQ ID NO: 19342 - RNA, 22 nt, synthetic construct
  source 1..22: mol_type = other RNA
catgtgctcgttgaaggaacaa

SEQ ID NO: 19343 - RNA, 22 nt, synthetic construct
  source 1..22: mol_type = other RNA
cattaaagacatttcactccct

SEQ ID NO: 19344 - RNA, 22 nt, synthetic construct
  source 1..22: mol_type = other RNA
cattaagacatcatctttaaaa

SEQ ID NO: 19345 - RNA, 22 nt, synthetic construct
  source 1..22: mol_type = other RNA
cattaagccgtgttaacttgca

SEQ ID NO: 19346 - RNA, 22 nt, synthetic construct
  source 1..22: mol_type = other RNA
cattacttttttcccctcaact

SEQ ID NO: 19347 - RNA, 22 nt, synthetic construct
  source 1..22: mol_type = other RNA
cattcaatgctatggtgactac

SEQ ID NO: 19348 - RNA, 22 nt, synthetic construct
  source 1..22: mol_type = other RNA
cattccaaaaaacactttctct

SEQ ID NO: 19349 - RNA, 22 nt, synthetic construct
  source 1..22: mol_type = other RNA
cattcgtgcaagttaacacggc

SEQ ID NO: 19350 - RNA, 22 nt, synthetic construct
  source 1..22: mol_type = other RNA
cattgaaggtatttaagattca

SEQ ID NO: 19351 - RNA, 22 nt, synthetic construct
  source 1..22: mol_type = other RNA
cattgaatgtgtagtttataat

SEQ ID NO: 19352 - RNA, 22 nt, synthetic construct
  source 1..22: mol_type = other RNA
cattgagagccgtaacaccacc

SEQ ID NO: 19353 - RNA, 22 nt, synthetic construct
  source 1..22: mol_type = other RNA
cattgagttagatcaatgctaa

SEQ ID NO: 19354 - RNA, 22 nt, synthetic construct
  source 1..22: mol_type = other RNA
cattgatctaactcaatgtgga

SEQ ID NO: 19355 - RNA, 22 nt, synthetic construct
  source 1..22: mol_type = other RNA
cattgatttatacagagtacca

SEQ ID NO: 19356 - RNA, 22 nt, synthetic construct
  source 1..22: mol_type = other RNA
cattgttccttcaacgagcaca

SEQ ID NO: 19357 - RNA, 22 nt, synthetic construct
  source 1..22: mol_type = other RNA
catttaacaaaaagaggagatt

SEQ ID NO: 19358 - RNA, 22 nt, synthetic construct
  source 1..22: mol_type = other RNA
catttagcattgatctaactca

SEQ ID NO: 19359 - RNA, 22 nt, synthetic construct
  source 1..22: mol_type = other RNA
catttcactcccttttctccac

SEQ ID NO: 19360 - RNA, 22 nt, synthetic construct
  source 1..22: mol_type = other RNA
catttctcaaactgtactttag

SEQ ID NO: 19361 - RNA, 22 nt, synthetic construct
  source 1..22: mol_type = other RNA
catttctttgatttcatttagc

SEQ ID NO: 19362 - RNA, 22 nt, synthetic construct
  source 1..22: mol_type = other RNA
cattttttgtcactataattgt

SEQ ID NO: 19363 - RNA, 22 nt, synthetic construct
  source 1..22: mol_type = other RNA
ccaaaaaacactttctctctga

SEQ ID NO: 19364 - RNA, 22 nt, synthetic construct
  source 1..22: mol_type = other RNA
ccaaaagaactaaagtacagtt

SEQ ID NO: 19365 - RNA, 22 nt, synthetic construct
  source 1..22: mol_type = other RNA
ccaaactagaattgaatcttaa

SEQ ID NO: 19366 - RNA, 22 nt, synthetic construct
  source 1..22: mol_type = other RNA
ccaacaaaaaagtttatttttg

SEQ ID NO: 19367 - RNA, 22 nt, synthetic construct
  source 1..22: mol_type = other RNA
ccaaccttaccttttctgggca

SEQ ID NO: 19368 - RNA, 22 nt, synthetic construct
  source 1..22: mol_type = other RNA
ccaaggtaaaagaattgcttga

SEQ ID NO: 19369 - RNA, 22 nt, synthetic construct
  source 1..22: mol_type = other RNA
ccaatatttgcccagaaaaggt

SEQ ID NO: 19370 - RNA, 22 nt, synthetic construct
  source 1..22: mol_type = other RNA
ccacatatccattgttccttca

SEQ ID NO: 19371 - RNA, 22 nt, synthetic construct
  source 1..22: mol_type = other RNA
ccacattgagttagatcaatgc

SEQ ID NO: 19372 - RNA, 22 nt, synthetic construct
  source 1..22: mol_type = other RNA
ccacctgagggagtggagaaag

SEQ ID NO: 19373 - RNA, 22 nt, synthetic construct
  source 1..22: mol_type = other RNA
ccacgttgcttgaaattgaaaa

SEQ ID NO: 19374 - RNA, 22 nt, synthetic construct
  source 1..22: mol_type = other RNA
ccactccctcaggtggtgttac

SEQ ID NO: 19375 - RNA, 22 nt, synthetic construct
  source 1..22: mol_type = other RNA
ccactgtgttctgtgtctctgt

SEQ ID NO: 19376 - RNA, 22 nt, synthetic construct
  source 1..22: mol_type = other RNA
ccagaaaaggtaaggttggtag

SEQ ID NO: 19377 - RNA, 22 nt, synthetic construct
  source 1..22: mol_type = other RNA
ccagaagaaaacagttccacgt

SEQ ID NO: 19378 - RNA, 22 nt, synthetic construct
  source 1..22: mol_type = other RNA
ccagaccagcatgggcaataca

SEQ ID NO: 19379 - RNA, 22 nt, synthetic construct
  source 1..22: mol_type = other RNA
ccagaggaacacagcattgaga

SEQ ID NO: 19380 - RNA, 22 nt, synthetic construct
  source 1..22: mol_type = other RNA
ccagcatgggcaatacattaag

SEQ ID NO: 19381 - RNA, 22 nt, synthetic construct
  source 1..22: mol_type = other RNA
ccagtatttccagaccagcatg

SEQ ID NO: 19382 - RNA, 22 nt, synthetic construct
  source 1..22: mol_type = other RNA
ccatagcattgaatgtgtagtt

SEQ ID NO: 19383 - RNA, 22 nt, synthetic construct
  source 1..22: mol_type = other RNA
ccatatatagtaagtgtcatta

SEQ ID NO: 19384 - RNA, 22 nt, synthetic construct
  source 1..22: mol_type = other RNA
ccatcataagtttttctgaagt

SEQ ID NO: 19385 - RNA, 22 nt, synthetic construct
  source 1..22: mol_type = other RNA
ccatccttgtatattgtcacaa

SEQ ID NO: 19386 - RNA, 22 nt, synthetic construct
  source 1..22: mol_type = other RNA
ccatgctggtctggaaatactg

SEQ ID NO: 19387 - RNA, 22 nt, synthetic construct
  source 1..22: mol_type = other RNA
ccatgtgctcgttgaaggaaca

SEQ ID NO: 19388 - RNA, 22 nt, synthetic construct
  source 1..22: mol_type = other RNA
ccattccaaaaaacactttctc

SEQ ID NO: 19389 - RNA, 22 nt, synthetic construct
  source 1..22: mol_type = other RNA
ccattgttccttcaacgagcac

SEQ ID NO: 19390 - RNA, 22 nt, synthetic construct
  source 1..22: mol_type = other RNA
cccaacaaaaaagtttattttt

SEQ ID NO: 19391 - RNA, 22 nt, synthetic construct
  source 1..22: mol_type = other RNA
cccagaaaaggtaaggttggta

SEQ ID NO: 19392 - RNA, 22 nt, synthetic construct
  source 1..22: mol_type = other RNA
cccagtatttccagaccagcat

SEQ ID NO: 19393 - RNA, 22 nt, synthetic construct
  source 1..22: mol_type = other RNA
cccatatatagtaagtgtcatt

SEQ ID NO: 19394 - RNA, 22 nt, synthetic construct
  source 1..22: mol_type = other RNA
cccatcataagtttttctgaag

SEQ ID NO: 19395 - RNA, 22 nt, synthetic construct
  source 1..22: mol_type = other RNA
cccatgctggtctggaaatact

SEQ ID NO: 19396 - RNA, 22 nt, synthetic construct
  source 1..22: mol_type = other RNA
cccctcaactttaataataaat

SEQ ID NO: 19397 - RNA, 22 nt, synthetic construct
  source 1..22: mol_type = other RNA
ccctcaactttaataataaatt

SEQ ID NO: 19398 - RNA, 22 nt, synthetic construct
  source 1..22: mol_type = other RNA
ccctcaggtggtgttacggctc

SEQ ID NO: 19399 - RNA, 22 nt, synthetic construct
  source 1..22: mol_type = other RNA
cccttttctccactgtgttctg

SEQ ID NO: 19400 - RNA, 22 nt, synthetic construct
  source 1..22: mol_type = other RNA
ccgtaacaccacctgagggagt

SEQ ID NO: 19401 - RNA, 22 nt, synthetic construct
  source 1..22: mol_type = other RNA
ccgtgttaacttgcacgaatgt

SEQ ID NO: 19402 - RNA, 22 nt, synthetic construct
  source 1..22: mol_type = other RNA
cctaccaaccttaccttttctg

SEQ ID NO: 19403 - RNA, 22 nt, synthetic construct
  source 1..22: mol_type = other RNA
cctagaacacagagacacagaa

SEQ ID NO: 19404 - RNA, 22 nt, synthetic construct
  source 1..22: mol_type = other RNA
cctagacttcttaactctatat

SEQ ID NO: 19405 - RNA, 22 nt, synthetic construct
  source 1..22: mol_type = other RNA
cctagatgaccacatatccatt

SEQ ID NO: 19406 - RNA, 22 nt, synthetic construct
  source 1..22: mol_type = other RNA
cctattaagttagttgctcatt

SEQ ID NO: 19407 - RNA, 22 nt, synthetic construct
  source 1..22: mol_type = other RNA
cctcaggtggtgttacggctct

SEQ ID NO: 19408 - RNA, 22 nt, synthetic construct
  source 1..22: mol_type = other RNA
cctcattttttgtcactataat

SEQ ID NO: 19409 - RNA, 22 nt, synthetic construct
  source 1..22: mol_type = other RNA
cctctggtactctgtataaatc

SEQ ID NO: 19410 - RNA, 22 nt, synthetic construct
  source 1..22: mol_type = other RNA
cctctttttgttaaatgtatat

SEQ ID NO: 19411 - RNA, 22 nt, synthetic construct
  source 1..22: mol_type = other RNA
cctgagggagtggagaaaggct

SEQ ID NO: 19412 - RNA, 22 nt, synthetic construct
  source 1..22: mol_type = other RNA
cctgtttttaaaagctaatttt

SEQ ID NO: 19413 - RNA, 22 nt, synthetic construct
  source 1..22: mol_type = other RNA
ccttaccttttctgggcaaata

SEQ ID NO: 19414 - RNA, 22 nt, synthetic construct
  source 1..22: mol_type = other RNA
ccttatatgtcttaaccatcct

SEQ ID NO: 19415 - RNA, 22 nt, synthetic construct
  source 1..22: mol_type = other RNA
ccttcaacgagcacatggtaaa

SEQ ID NO: 19416 - RNA, 22 nt, synthetic construct
  source 1..22: mol_type = other RNA
ccttcaatgtcacaagcagctt

SEQ ID NO: 19417 - RNA, 22 nt, synthetic construct
  source 1..22: mol_type = other RNA
ccttcttccacattgagttaga

SEQ ID NO: 19418 - RNA, 22 nt, synthetic construct
  source 1..22: mol_type = other RNA
ccttgtatattgtcacaaaatc

SEQ ID NO: 19419 - RNA, 22 nt, synthetic construct
  source 1..22: mol_type = other RNA
cctttctccactccctcaggtg

SEQ ID NO: 19420 - RNA, 22 nt, synthetic construct
  source 1..22: mol_type = other RNA
ccttttctccactgtgttctgt

SEQ ID NO: 19421 - RNA, 22 nt, synthetic construct
  source 1..22: mol_type = other RNA
ccttttctgggcaaatattggt

SEQ ID NO: 19422 - RNA, 22 nt, synthetic construct
  source 1..22: mol_type = other RNA
cgaatgtaaccttcttccacat

SEQ ID NO: 19423 - RNA, 22 nt, synthetic construct
  source 1..22: mol_type = other RNA
cgagcacatggtaaagagccta

SEQ ID NO: 19424 - RNA, 22 nt, synthetic construct
  source 1..22: mol_type = other RNA
cggctctcaatgctgtgttcct

SEQ ID NO: 19425 - RNA, 22 nt, synthetic construct
  source 1..22: mol_type = other RNA
cggcttaatgattaactatgtt

SEQ ID NO: 19426 - RNA, 22 nt, synthetic construct
  source 1..22: mol_type = other RNA
cgtaacaccacctgagggagtg

SEQ ID NO: 19427 - RNA, 22 nt, synthetic construct
  source 1..22: mol_type = other RNA
cgtgcaagttaacacggcttaa

SEQ ID NO: 19428 - RNA, 22 nt, synthetic construct
  source 1..22: mol_type = other RNA
cgtggaactgttttcttctgga

SEQ ID NO: 19429 - RNA, 22 nt, synthetic construct
  source 1..22: mol_type = other RNA
cgtgttaacttgcacgaatgta

SEQ ID NO: 19430 - RNA, 22 nt, synthetic construct
  source 1..22: mol_type = other RNA
cgttgaaggaacaatggatatg

SEQ ID NO: 19431 - RNA, 22 nt, synthetic construct
  source 1..22: mol_type = other RNA
cgttgcttgaaattgaaaatca

SEQ ID NO: 19432 - RNA, 22 nt, synthetic construct
  source 1..22: mol_type = other RNA
ctaaagtacagtttgagaaatg

SEQ ID NO: 19433 - RNA, 22 nt, synthetic construct
  source 1..22: mol_type = other RNA
ctaaatgaaatcaaagaaatga

SEQ ID NO: 19434 - RNA, 22 nt, synthetic construct
  source 1..22: mol_type = other RNA
ctaacaaacttcagaaaaactt

SEQ ID NO: 19435 - RNA, 22 nt, synthetic construct
  source 1..22: mol_type = other RNA
ctaactcaatgtggaagaaggt

SEQ ID NO: 19436 - RNA, 22 nt, synthetic construct
  source 1..22: mol_type = other RNA
ctaacttaataggtaatttgaa

SEQ ID NO: 19437 - RNA, 22 nt, synthetic construct
  source 1..22: mol_type = other RNA
ctaagctaacaaacttcagaaa

SEQ ID NO: 19438 - RNA, 22 nt, synthetic construct
  source 1..22: mol_type = other RNA
ctacacattcaatgctatggtg

SEQ ID NO: 19439 - RNA, 22 nt, synthetic construct
  source 1..22: mol_type = other RNA
ctaccaaccttaccttttctgg

SEQ ID NO: 19440 - RNA, 22 nt, synthetic construct
  source 1..22: mol_type = other RNA
ctacctgtttttaaaagctaat

SEQ ID NO: 19441 - RNA, 22 nt, synthetic construct
  source 1..22: mol_type = other RNA
ctagaacacagagacacagaac

SEQ ID NO: 19442 - RNA, 22 nt, synthetic construct
  source 1..22: mol_type = other RNA
ctagaattgaatcttaaatacc

SEQ ID NO: 19443 - RNA, 22 nt, synthetic construct
  source 1..22: mol_type = other RNA
ctagacttcttaactctatata

SEQ ID NO: 19444 - RNA, 22 nt, synthetic construct
  source 1..22: mol_type = other RNA
ctagatgaccacatatccattg

SEQ ID NO: 19445 - RNA, 22 nt, synthetic construct
  source 1..22: mol_type = other RNA
ctaggaccaaactagaattgaa

SEQ ID NO: 19446 - RNA, 22 nt, synthetic construct
  source 1..22: mol_type = other RNA
ctaggctctttaccatgtgctc

SEQ ID NO: 19447 - RNA, 22 nt, synthetic construct
  source 1..22: mol_type = other RNA
ctaggtctgcttccagaagaaa

SEQ ID NO: 19448 - RNA, 22 nt, synthetic construct
  source 1..22: mol_type = other RNA
ctagtttggtcctagatgacca

SEQ ID NO: 19449 - RNA, 22 nt, synthetic construct
  source 1..22: mol_type = other RNA
ctatatataccaatatttgccc

SEQ ID NO: 19450 - RNA, 22 nt, synthetic construct
  source 1..22: mol_type = other RNA
ctatatatgggattttgtgaca

SEQ ID NO: 19451 - RNA, 22 nt, synthetic construct
  source 1..22: mol_type = other RNA
ctatggtgactacctgttttta

SEQ ID NO: 19452 - RNA, 22 nt, synthetic construct
  source 1..22: mol_type = other RNA
ctatgttcacctaccaacctta

SEQ ID NO: 19453 - RNA, 22 nt, synthetic construct
  source 1..22: mol_type = other RNA
ctattaagttagttgctcattt

SEQ ID NO: 19454 - RNA, 22 nt, synthetic construct
  source 1..22: mol_type = other RNA
ctcaaactgtactttagttctt

SEQ ID NO: 19455 - RNA, 22 nt, synthetic construct
  source 1..22: mol_type = other RNA
ctcaagcaattcttttaccttg

SEQ ID NO: 19456 - RNA, 22 nt, synthetic construct
  source 1..22: mol_type = other RNA
ctcaatgctgtgttcctctggt

SEQ ID NO: 19457 - RNA, 22 nt, synthetic construct
  source 1..22: mol_type = other RNA
ctcaatgtggaagaaggttaca

SEQ ID NO: 19458 - RNA, 22 nt, synthetic construct
  source 1..22: mol_type = other RNA
ctcaggtggtgttacggctctc

SEQ ID NO: 19459 - RNA, 22 nt, synthetic construct
  source 1..22: mol_type = other RNA
ctcatttctttgatttcattta

SEQ ID NO: 19460 - RNA, 22 nt, synthetic construct
  source 1..22: mol_type = other RNA
ctcattttttgtcactataatt

SEQ ID NO: 19461 - RNA, 22 nt, synthetic construct
  source 1..22: mol_type = other RNA
ctccactccctcaggtggtgtt

SEQ ID NO: 19462 - RNA, 22 nt, synthetic construct
  source 1..22: mol_type = other RNA
ctccactgtgttctgtgtctct

SEQ ID NO: 19463 - RNA, 22 nt, synthetic construct
  source 1..22: mol_type = other RNA
ctccctcaggtggtgttacggc

SEQ ID NO: 19464 - RNA, 22 nt, synthetic construct
  source 1..22: mol_type = other RNA
ctcccttttctccactgtgttc

SEQ ID NO: 19465 - RNA, 22 nt, synthetic construct
  source 1..22: mol_type = other RNA
ctcctcattttttgtcactata

SEQ ID NO: 19466 - RNA, 22 nt, synthetic construct
  source 1..22: mol_type = other RNA
ctcctctttttgttaaatgtat

SEQ ID NO: 19467 - RNA, 22 nt, synthetic construct
  source 1..22: mol_type = other RNA
ctcgttgaaggaacaatggata

SEQ ID NO: 19468 - RNA, 22 nt, synthetic construct
  source 1..22: mol_type = other RNA
ctctatatataccaatatttgc

SEQ ID NO: 19469 - RNA, 22 nt, synthetic construct
  source 1..22: mol_type = other RNA
ctctcaatgctgtgttcctctg

SEQ ID NO: 19470 - RNA, 22 nt, synthetic construct
  source 1..22: mol_type = other RNA
ctctctgaagcctttctccact

SEQ ID NO: 19471 - RNA, 22 nt, synthetic construct
  source 1..22: mol_type = other RNA
ctctgaagcctttctccactcc

SEQ ID NO: 19472 - RNA, 22 nt, synthetic construct
  source 1..22: mol_type = other RNA
ctctggtactctgtataaatca

SEQ ID NO: 19473 - RNA, 22 nt, synthetic construct
  source 1..22: mol_type = other RNA
ctctgtataaatcaatgtataa

SEQ ID NO: 19474 - RNA, 22 nt, synthetic construct
  source 1..22: mol_type = other RNA
ctctgtgttctaggctctttac

SEQ ID NO: 19475 - RNA, 22 nt, synthetic construct
  source 1..22: mol_type = other RNA
ctctttaccatgtgctcgttga

SEQ ID NO: 19476 - RNA, 22 nt, synthetic construct
  source 1..22: mol_type = other RNA
ctgaagcctttctccactccct

SEQ ID NO: 19477 - RNA, 22 nt, synthetic construct
  source 1..22: mol_type = other RNA
ctgaagtttgttagcttagtaa

SEQ ID NO: 19478 - RNA, 22 nt, synthetic construct
  source 1..22: mol_type = other RNA
ctgagggagtggagaaaggctt

SEQ ID NO: 19479 - RNA, 22 nt, synthetic construct
  source 1..22: mol_type = other RNA
ctgcttccagaagaaaacagtt

SEQ ID NO: 19480 - RNA, 22 nt, synthetic construct
  source 1..22: mol_type = other RNA
ctgcttgtgacattgaaggtat

SEQ ID NO: 19481 - RNA, 22 nt, synthetic construct
  source 1..22: mol_type = other RNA
ctggaaatactgggctcaagca

SEQ ID NO: 19482 - RNA, 22 nt, synthetic construct
  source 1..22: mol_type = other RNA
ctggaagcagacctagacttct

SEQ ID NO: 19483 - RNA, 22 nt, synthetic construct
  source 1..22: mol_type = other RNA
ctgggcaaatattggtatatat

SEQ ID NO: 19484 - RNA, 22 nt, synthetic construct
  source 1..22: mol_type = other RNA
ctgggctcaagcaattctttta

SEQ ID NO: 19485 - RNA, 22 nt, synthetic construct
  source 1..22: mol_type = other RNA
ctggtactctgtataaatcaat

SEQ ID NO: 19486 - RNA, 22 nt, synthetic construct
  source 1..22: mol_type = other RNA
ctggtctggaaatactgggctc

SEQ ID NO: 19487 - RNA, 22 nt, synthetic construct
  source 1..22: mol_type = other RNA
ctgtactttagttcttttggaa

SEQ ID NO: 19488 - RNA, 22 nt, synthetic construct
  source 1..22: mol_type = other RNA
ctgtattataaactacacattc

SEQ ID NO: 19489 - RNA, 22 nt, synthetic construct
  source 1..22: mol_type = other RNA
ctgtgtctctgtgttctaggct

SEQ ID NO: 19490 - RNA, 22 nt, synthetic construct
  source 1..22: mol_type = other RNA
ctgtgttcctctggtactctgt

SEQ ID NO: 19491 - RNA, 22 nt, synthetic construct
  source 1..22: mol_type = other RNA
ctgtgttctaggctctttacca

SEQ ID NO: 19492 - RNA, 22 nt, synthetic construct
  source 1..22: mol_type = other RNA
ctgtgttctgtgtctctgtgtt

SEQ ID NO: 19493 - RNA, 22 nt, synthetic construct
  source 1..22: mol_type = other RNA
ctgtttccaaaagaactaaagt

SEQ ID NO: 19494 - RNA, 22 nt, synthetic construct
  source 1..22: mol_type = other RNA
ctgttttcttctggaagcagac

SEQ ID NO: 19495 - RNA, 22 nt, synthetic construct
  source 1..22: mol_type = other RNA
cttaaataccttcaatgtcaca

SEQ ID NO: 19496 - RNA, 22 nt, synthetic construct
  source 1..22: mol_type = other RNA
cttaaccatccttgtatattgt

SEQ ID NO: 19497 - RNA, 22 nt, synthetic construct
  source 1..22: mol_type = other RNA
cttaactctatatataccaata

SEQ ID NO: 19498 - RNA, 22 nt, synthetic construct
  source 1..22: mol_type = other RNA
cttaataggtaatttgaaattg

SEQ ID NO: 19499 - RNA, 22 nt, synthetic construct
  source 1..22: mol_type = other RNA
cttaatgattaactatgttcac

SEQ ID NO: 19500 - RNA, 22 nt, synthetic construct
  source 1..22: mol_type = other RNA
cttaatgtattgcccatgctgg

SEQ ID NO: 19501 - RNA, 22 nt, synthetic construct
  source 1..22: mol_type = other RNA
cttaattcattacttttttccc

SEQ ID NO: 19502 - RNA, 22 nt, synthetic construct
  source 1..22: mol_type = other RNA
cttaccttttctgggcaaatat

SEQ ID NO: 19503 - RNA, 22 nt, synthetic construct
  source 1..22: mol_type = other RNA
cttactatatatgggattttgt

SEQ ID NO: 19504 - RNA, 22 nt, synthetic construct
  source 1..22: mol_type = other RNA
cttatatgtcttaaccatcctt

SEQ ID NO: 19505 - RNA, 22 nt, synthetic construct
  source 1..22: mol_type = other RNA
cttatgatgggcaagctgcttg

SEQ ID NO: 19506 - RNA, 22 nt, synthetic construct
  source 1..22: mol_type = other RNA
cttcaacgagcacatggtaaag

SEQ ID NO: 19507 - RNA, 22 nt, synthetic construct
  source 1..22: mol_type = other RNA
cttcaatgtcacaagcagcttg

SEQ ID NO: 19508 - RNA, 22 nt, synthetic construct
  source 1..22: mol_type = other RNA
cttcagaaaaacttatgatggg

SEQ ID NO: 19509 - RNA, 22 nt, synthetic construct
  source 1..22: mol_type = other RNA
cttcagagagaaagtgtttttt

SEQ ID NO: 19510 - RNA, 22 nt, synthetic construct
  source 1..22: mol_type = other RNA
cttccacattgagttagatcaa

SEQ ID NO: 19511 - RNA, 22 nt, synthetic construct
  source 1..22: mol_type = other RNA
cttccagaagaaaacagttcca

SEQ ID NO: 19512 - RNA, 22 nt, synthetic construct
  source 1..22: mol_type = other RNA
cttctggaagcagacctagact

SEQ ID NO: 19513 - RNA, 22 nt, synthetic construct
  source 1..22: mol_type = other RNA
cttcttaactctatatatacca

SEQ ID NO: 19514 - RNA, 22 nt, synthetic construct
  source 1..22: mol_type = other RNA
cttcttccacattgagttagat

SEQ ID NO: 19515 - RNA, 22 nt, synthetic construct
  source 1..22: mol_type = other RNA
cttgagcccagtatttccagac

SEQ ID NO: 19516 - RNA, 22 nt, synthetic construct
  source 1..22: mol_type = other RNA
cttgattttcaatttcaagcaa

SEQ ID NO: 19517 - RNA, 22 nt, synthetic construct
  source 1..22: mol_type = other RNA
cttgcacgaatgtaaccttctt

SEQ ID NO: 19518 - RNA, 22 nt, synthetic construct
  source 1..22: mol_type = other RNA
cttgcccatcataagtttttct

SEQ ID NO: 19519 - RNA, 22 nt, synthetic construct
  source 1..22: mol_type = other RNA
cttgtaaatctcttaaaatcat

SEQ ID NO: 19520 - RNA, 22 nt, synthetic construct
  source 1..22: mol_type = other RNA
cttgtatattgtcacaaaatcc

SEQ ID NO: 19521 - RNA, 22 nt, synthetic construct
  source 1..22: mol_type = other RNA
cttgtgacattgaaggtattta

SEQ ID NO: 19522 - RNA, 22 nt, synthetic construct
  source 1..22: mol_type = other RNA
ctttaatgacacttactatata

SEQ ID NO: 19523 - RNA, 22 nt, synthetic construct
  source 1..22: mol_type = other RNA
ctttaccatgtgctcgttgaag

SEQ ID NO: 19524 - RNA, 22 nt, synthetic construct
  source 1..22: mol_type = other RNA
ctttagttcttttggaaacagt

SEQ ID NO: 19525 - RNA, 22 nt, synthetic construct
  source 1..22: mol_type = other RNA
ctttctccactccctcaggtgg

SEQ ID NO: 19526 - RNA, 22 nt, synthetic construct
  source 1..22: mol_type = other RNA
ctttctctctgaagcctttctc

SEQ ID NO: 19527 - RNA, 22 nt, synthetic construct
  source 1..22: mol_type = other RNA
ctttgatttcatttagcattga

SEQ ID NO: 19528 - RNA, 22 nt, synthetic construct
  source 1..22: mol_type = other RNA
ctttgctgtattataaactaca

SEQ ID NO: 19529 - RNA, 22 nt, synthetic construct
  source 1..22: mol_type = other RNA
cttttaaaaacaggtagtcacc

SEQ ID NO: 19530 - RNA, 22 nt, synthetic construct
  source 1..22: mol_type = other RNA
cttttctccactgtgttctgtg

SEQ ID NO: 19531 - RNA, 22 nt, synthetic construct
  source 1..22: mol_type = other RNA
cttttctgggcaaatattggta

SEQ ID NO: 19532 - RNA, 22 nt, synthetic construct
  source 1..22: mol_type = other RNA
cttttggaaacagtgatccatt

SEQ ID NO: 19533 - RNA, 22 nt, synthetic construct
  source 1..22: mol_type = other RNA
cttttttcccctcaactttaat

SEQ ID NO: 19534 - RNA, 22 nt, synthetic construct
  source 1..22: mol_type = other RNA
cttttttgttgggtaaatttat

SEQ ID NO: 19535 - RNA, 22 nt, synthetic construct
  source 1..22: mol_type = other RNA
gaaaaacttatgatgggcaagc

SEQ ID NO: 19536 - RNA, 22 nt, synthetic construct
  source 1..22: mol_type = other RNA
gaaaacagttccacgttgcttg

SEQ ID NO: 19537 - RNA, 22 nt, synthetic construct
  source 1..22: mol_type = other RNA
gaaaagggagtgaaatgtcttt

SEQ ID NO: 19538 - RNA, 22 nt, synthetic construct
  source 1..22: mol_type = other RNA
gaaaaggtaaggttggtaggtg

SEQ ID NO: 19539 - RNA, 22 nt, synthetic construct
  source 1..22: mol_type = other RNA
gaaacagtgatccattccaaaa

SEQ ID NO: 19540 - RNA, 22 nt, synthetic construct
  source 1..22: mol_type = other RNA
gaaaggcttcagagagaaagtg

SEQ ID NO: 19541 - RNA, 22 nt, synthetic construct
  source 1..22: mol_type = other RNA
gaaagtgttttttggaatggat

SEQ ID NO: 19542 - RNA, 22 nt, synthetic construct
  source 1..22: mol_type = other RNA
gaaatactgggctcaagcaatt

SEQ ID NO: 19543 - RNA, 22 nt, synthetic construct
  source 1..22: mol_type = other RNA
gaaatcaaagaaatgagcaact

SEQ ID NO: 19544 - RNA, 22 nt, synthetic construct
  source 1..22: mol_type = other RNA
gaaatgagcaactaacttaata

SEQ ID NO: 19545 - RNA, 22 nt, synthetic construct
  source 1..22: mol_type = other RNA
gaaatgcatacttaattcatta

SEQ ID NO: 19546 - RNA, 22 nt, synthetic construct
  source 1..22: mol_type = other RNA
gaaatgtctttaatgacactta

SEQ ID NO: 19547 - RNA, 22 nt, synthetic construct
  source 1..22: mol_type = other RNA
gaaattgtatttaactttgctg

SEQ ID NO: 19548 - RNA, 22 nt, synthetic construct
  source 1..22: mol_type = other RNA
gaacaatggatatgtggtcatc

SEQ ID NO: 19549 - RNA, 22 nt, synthetic construct
  source 1..22: mol_type = other RNA
gaacacagagacacagaacaca

SEQ ID NO: 19550 - RNA, 22 nt, synthetic construct
  source 1..22: mol_type = other RNA
gaacacagcattgagagccgta

SEQ ID NO: 19551 - RNA, 22 nt, synthetic construct
  source 1..22: mol_type = other RNA
gaacacagtggagaaaagggag

SEQ ID NO: 19552 - RNA, 22 nt, synthetic construct
  source 1..22: mol_type = other RNA
gaacatagttaatcattaagcc

SEQ ID NO: 19553 - RNA, 22 nt, synthetic construct
  source 1..22: mol_type = other RNA
gaactaaagtacagtttgagaa

SEQ ID NO: 19554 - RNA, 22 nt, synthetic construct
  source 1..22: mol_type = other RNA
gaactgttttcttctggaagca

SEQ ID NO: 19555 - RNA, 22 nt, synthetic construct
  source 1..22: mol_type = other RNA
gaagaaaacagttccacgttgc

SEQ ID NO: 19556 - RNA, 22 nt, synthetic construct
  source 1..22: mol_type = other RNA
gaagaaggttacattcgtgcaa

SEQ ID NO: 19557 - RNA, 22 nt, synthetic construct
  source 1..22: mol_type = other RNA
gaagcagacctagacttcttaa

SEQ ID NO: 19558 - RNA, 22 nt, synthetic construct
  source 1..22: mol_type = other RNA
gaagcctttctccactccctca

SEQ ID NO: 19559 - RNA, 22 nt, synthetic construct
  source 1..22: mol_type = other RNA
gaaggaacaatggatatgtggt

SEQ ID NO: 19560 - RNA, 22 nt, synthetic construct
  source 1..22: mol_type = other RNA
gaaggtatttaagattcaattc

SEQ ID NO: 19561 - RNA, 22 nt, synthetic construct
  source 1..22: mol_type = other RNA
gaaggttacattcgtgcaagtt

SEQ ID NO: 19562 - RNA, 22 nt, synthetic construct
  source 1..22: mol_type = other RNA
gaagtctaggtctgcttccaga

SEQ ID NO: 19563 - RNA, 22 nt, synthetic construct
  source 1..22: mol_type = other RNA
gaagtttgttagcttagtaaca

SEQ ID NO: 19564 - RNA, 22 nt, synthetic construct
  source 1..22: mol_type = other RNA
gaatcttaaataccttcaatgt

SEQ ID NO: 19565 - RNA, 22 nt, synthetic construct
  source 1..22: mol_type = other RNA
gaatggatcactgtttccaaaa

SEQ ID NO: 19566 - RNA, 22 nt, synthetic construct
  source 1..22: mol_type = other RNA
gaatgtaaccttcttccacatt

SEQ ID NO: 19567 - RNA, 22 nt, synthetic construct
  source 1..22: mol_type = other RNA
gaatgtgtagtttataatacag

SEQ ID NO: 19568 - RNA, 22 nt, synthetic construct
  source 1..22: mol_type = other RNA
gaattaagtatgcatttctcaa

SEQ ID NO: 19569 - RNA, 22 nt, synthetic construct
  source 1..22: mol_type = other RNA
gaattgaatcttaaataccttc

SEQ ID NO: 19570 - RNA, 22 nt, synthetic construct
  source 1..22: mol_type = other RNA
gaattgcttgagcccagtattt

SEQ ID NO: 19571 - RNA, 22 nt, synthetic construct
  source 1..22: mol_type = other RNA
gacaaaaaatgaggagcatata

SEQ ID NO: 19572 - RNA, 22 nt, synthetic construct
  source 1..22: mol_type = other RNA
gacaatatacaaggatggttaa

SEQ ID NO: 19573 - RNA, 22 nt, synthetic construct
  source 1..22: mol_type = other RNA
gacacagaacacagtggagaaa

SEQ ID NO: 19574 - RNA, 22 nt, synthetic construct
  source 1..22: mol_type = other RNA
gacacttactatatatgggatt

SEQ ID NO: 19575 - RNA, 22 nt, synthetic construct
  source 1..22: mol_type = other RNA
gacatataaggtgatgcaaaaa

SEQ ID NO: 19576 - RNA, 22 nt, synthetic construct
  source 1..22: mol_type = other RNA
gacattgaaggtatttaagatt

SEQ ID NO: 19577 - RNA, 22 nt, synthetic construct
  source 1..22: mol_type = other RNA
gacatttcactcccttttctcc

SEQ ID NO: 19578 - RNA, 22 nt, synthetic construct
  source 1..22: mol_type = other RNA
gaccaaactagaattgaatctt

SEQ ID NO: 19579 - RNA, 22 nt, synthetic construct
  source 1..22: mol_type = other RNA
gaccacatatccattgttcctt

SEQ ID NO: 19580 - RNA, 22 nt, synthetic construct
  source 1..22: mol_type = other RNA
gaccagcatgggcaatacatta

SEQ ID NO: 19581 - RNA, 22 nt, synthetic construct
  source 1..22: mol_type = other RNA
gacctagacttcttaactctat

SEQ ID NO: 19582 - RNA, 22 nt, synthetic construct
  source 1..22: mol_type = other RNA
gactacctgtttttaaaagcta

SEQ ID NO: 19583 - RNA, 22 nt, synthetic construct
  source 1..22: mol_type = other RNA
gacttcttaactctatatatac

SEQ ID NO: 19584 - RNA, 22 nt, synthetic construct
  source 1..22: mol_type = other RNA
gacttgtaaatctcttaaaatc

SEQ ID NO: 19585 - RNA, 22 nt, synthetic construct
  source 1..22: mol_type = other RNA
gagaaaagggagtgaaatgtct

SEQ ID NO: 19586 - RNA, 22 nt, synthetic construct
  source 1..22: mol_type = other RNA
gagaaaggcttcagagagaaag

SEQ ID NO: 19587 - RNA, 22 nt, synthetic construct
  source 1..22: mol_type = other RNA
gagaaagtgttttttggaatgg

SEQ ID NO: 19588 - RNA, 22 nt, synthetic construct
  source 1..22: mol_type = other RNA
gagaaatgcatacttaattcat

SEQ ID NO: 19589 - RNA, 22 nt, synthetic construct
  source 1..22: mol_type = other RNA
gagacacagaacacagtggaga

SEQ ID NO: 19590 - RNA, 22 nt, synthetic construct
  source 1..22: mol_type = other RNA
gagagaaagtgttttttggaat

SEQ ID NO: 19591 - RNA, 22 nt, synthetic construct
  source 1..22: mol_type = other RNA
gagagccgtaacaccacctgag

SEQ ID NO: 19592 - RNA, 22 nt, synthetic construct
  source 1..22: mol_type = other RNA
gagatttacaagtcaaaaataa

SEQ ID NO: 19593 - RNA, 22 nt, synthetic construct
  source 1..22: mol_type = other RNA
gagcaactaacttaataggtaa

SEQ ID NO: 19594 - RNA, 22 nt, synthetic construct
  source 1..22: mol_type = other RNA
gagcacatggtaaagagcctag

SEQ ID NO: 19595 - RNA, 22 nt, synthetic construct
  source 1..22: mol_type = other RNA
gagcatataattatacattgat

SEQ ID NO: 19596 - RNA, 22 nt, synthetic construct
  source 1..22: mol_type = other RNA
gagcccagtatttccagaccag

SEQ ID NO: 19597 - RNA, 22 nt, synthetic construct
  source 1..22: mol_type = other RNA
gagccgtaacaccacctgaggg

SEQ ID NO: 19598 - RNA, 22 nt, synthetic construct
  source 1..22: mol_type = other RNA
gagcctagaacacagagacaca

SEQ ID NO: 19599 - RNA, 22 nt, synthetic construct
  source 1..22: mol_type = other RNA
gaggaacacagcattgagagcc

SEQ ID NO: 19600 - RNA, 22 nt, synthetic construct
  source 1..22: mol_type = other RNA
gaggagattaataacatttttt

SEQ ID NO: 19601 - RNA, 22 nt, synthetic construct
  source 1..22: mol_type = other RNA
gaggagcatataattatacatt

SEQ ID NO: 19602 - RNA, 22 nt, synthetic construct
  source 1..22: mol_type = other RNA
gaggccaaggtaaaagaattgc

SEQ ID NO: 19603 - RNA, 22 nt, synthetic construct
  source 1..22: mol_type = other RNA
gagggagtggagaaaggcttca

SEQ ID NO: 19604 - RNA, 22 nt, synthetic construct
  source 1..22: mol_type = other RNA
gaggggaaaaaagtaatgaatt

SEQ ID NO: 19605 - RNA, 22 nt, synthetic construct
  source 1..22: mol_type = other RNA
gagtaccagaggaacacagcat

SEQ ID NO: 19606 - RNA, 22 nt, synthetic construct
  source 1..22: mol_type = other RNA
gagtgaaatgtctttaatgaca

SEQ ID NO: 19607 - RNA, 22 nt, synthetic construct
  source 1..22: mol_type = other RNA
gagtggagaaaggcttcagaga

SEQ ID NO: 19608 - RNA, 22 nt, synthetic construct
  source 1..22: mol_type = other RNA
gagttaagaagtctaggtctgc

SEQ ID NO: 19609 - RNA, 22 nt, synthetic construct
  source 1..22: mol_type = other RNA
gagttagatcaatgctaaatga

SEQ ID NO: 19610 - RNA, 22 nt, synthetic construct
  source 1..22: mol_type = other RNA
gatatgtggtcatctaggacca

SEQ ID NO: 19611 - RNA, 22 nt, synthetic construct
  source 1..22: mol_type = other RNA
gatcaatgctaaatgaaatcaa

SEQ ID NO: 19612 - RNA, 22 nt, synthetic construct
  source 1..22: mol_type = other RNA
gatcactgtttccaaaagaact

SEQ ID NO: 19613 - RNA, 22 nt, synthetic construct
  source 1..22: mol_type = other RNA
gatccattccaaaaaacacttt

SEQ ID NO: 19614 - RNA, 22 nt, synthetic construct
  source 1..22: mol_type = other RNA
gatctaactcaatgtggaagaa

SEQ ID NO: 19615 - RNA, 22 nt, synthetic construct
  source 1..22: mol_type = other RNA
gatgaccacatatccattgttc

SEQ ID NO: 19616 - RNA, 22 nt, synthetic construct
  source 1..22: mol_type = other RNA
gatgatgtcttaatgtattgcc

SEQ ID NO: 19617 - RNA, 22 nt, synthetic construct
  source 1..22: mol_type = other RNA
gatgggcaagctgcttgtgaca

SEQ ID NO: 19618 - RNA, 22 nt, synthetic construct
  source 1..22: mol_type = other RNA
gatggttaagacatataaggtg

SEQ ID NO: 19619 - RNA, 22 nt, synthetic construct
  source 1..22: mol_type = other RNA
gatgtcttaatgtattgcccat

SEQ ID NO: 19620 - RNA, 22 nt, synthetic construct
  source 1..22: mol_type = other RNA
gattaactatgttcacctacca

SEQ ID NO: 19621 - RNA, 22 nt, synthetic construct
  source 1..22: mol_type = other RNA
gattcaattctagtttggtcct

SEQ ID NO: 19622 - RNA, 22 nt, synthetic construct
  source 1..22: mol_type = other RNA
gatttacaagtcaaaaataaac

SEQ ID NO: 19623 - RNA, 22 nt, synthetic construct
  source 1..22: mol_type = other RNA
gatttatacagagtaccagagg

SEQ ID NO: 19624 - RNA, 22 nt, synthetic construct
  source 1..22: mol_type = other RNA
gatttcatttagcattgatcta

SEQ ID NO: 19625 - RNA, 22 nt, synthetic construct
  source 1..22: mol_type = other RNA
gattttaagagatttacaagtc

SEQ ID NO: 19626 - RNA, 22 nt, synthetic construct
  source 1..22: mol_type = other RNA
gattttcaatttcaagcaacgt

SEQ ID NO: 19627 - RNA, 22 nt, synthetic construct
  source 1..22: mol_type = other RNA
gattttgtgacaatatacaagg

SEQ ID NO: 19628 - RNA, 22 nt, synthetic construct
  source 1..22: mol_type = other RNA
gcaaagttaaatacaatttcaa

SEQ ID NO: 19629 - RNA, 22 nt, synthetic construct
  source 1..22: mol_type = other RNA
gcaaatattggtatatatagag

SEQ ID NO: 19630 - RNA, 22 nt, synthetic construct
  source 1..22: mol_type = other RNA
gcaacgtggaactgttttcttc

SEQ ID NO: 19631 - RNA, 22 nt, synthetic construct
  source 1..22: mol_type = other RNA
gcaactaacttaataggtaatt

SEQ ID NO: 19632 - RNA, 22 nt, synthetic construct
  source 1..22: mol_type = other RNA
gcaagctgcttgtgacattgaa

SEQ ID NO: 19633 - RNA, 22 nt, synthetic construct
  source 1..22: mol_type = other RNA
gcaagttaacacggcttaatga

SEQ ID NO: 19634 - RNA, 22 nt, synthetic construct
  source 1..22: mol_type = other RNA
gcaatacattaagacatcatct

SEQ ID NO: 19635 - RNA, 22 nt, synthetic construct
  source 1..22: mol_type = other RNA
gcacatggtaaagagcctagaa

SEQ ID NO: 19636 - RNA, 22 nt, synthetic construct
  source 1..22: mol_type = other RNA
gcacgaatgtaaccttcttcca

SEQ ID NO: 19637 - RNA, 22 nt, synthetic construct
  source 1..22: mol_type = other RNA
gcagacctagacttcttaactc

SEQ ID NO: 19638 - RNA, 22 nt, synthetic construct
  source 1..22: mol_type = other RNA
gcagcttgcccatcataagttt

SEQ ID NO: 19639 - RNA, 22 nt, synthetic construct
  source 1..22: mol_type = other RNA
gcatacttaattcattactttt

SEQ ID NO: 19640 - RNA, 22 nt, synthetic construct
  source 1..22: mol_type = other RNA
gcatcaccttatatgtcttaac

SEQ ID NO: 19641 - RNA, 22 nt, synthetic construct
  source 1..22: mol_type = other RNA
gcatgggcaatacattaagaca

SEQ ID NO: 19642 - RNA, 22 nt, synthetic construct
  source 1..22: mol_type = other RNA
gcattgaatgtgtagtttataa

SEQ ID NO: 19643 - RNA, 22 nt, synthetic construct
  source 1..22: mol_type = other RNA
gcattgagagccgtaacaccac

SEQ ID NO: 19644 - RNA, 22 nt, synthetic construct
  source 1..22: mol_type = other RNA
gcattgatctaactcaatgtgg

SEQ ID NO: 19645 - RNA, 22 nt, synthetic construct
  source 1..22: mol_type = other RNA
gcatttctcaaactgtacttta

SEQ ID NO: 19646 - RNA, 22 nt, synthetic construct
  source 1..22: mol_type = other RNA
gccaaggtaaaagaattgcttg

SEQ ID NO: 19647 - RNA, 22 nt, synthetic construct
  source 1..22: mol_type = other RNA
gcccagaaaaggtaaggttggt

SEQ ID NO: 19648 - RNA, 22 nt, synthetic construct
  source 1..22: mol_type = other RNA
gcccagtatttccagaccagca

SEQ ID NO: 19649 - RNA, 22 nt, synthetic construct
  source 1..22: mol_type = other RNA
gcccatcataagtttttctgaa

SEQ ID NO: 19650 - RNA, 22 nt, synthetic construct
  source 1..22: mol_type = other RNA
gcccatgctggtctggaaatac

SEQ ID NO: 19651 - RNA, 22 nt, synthetic construct
  source 1..22: mol_type = other RNA
gccgtaacaccacctgagggag

SEQ ID NO: 19652 - RNA, 22 nt, synthetic construct
  source 1..22: mol_type = other RNA
gccgtgttaacttgcacgaatg

SEQ ID NO: 19653 - RNA, 22 nt, synthetic construct
  source 1..22: mol_type = other RNA
gcctagaacacagagacacaga

SEQ ID NO: 19654 - RNA, 22 nt, synthetic construct
  source 1..22: mol_type = other RNA
gcctttctccactccctcaggt

SEQ ID NO: 19655 - RNA, 22 nt, synthetic construct
  source 1..22: mol_type = other RNA
gctaaatgaaatcaaagaaatg

SEQ ID NO: 19656 - RNA, 22 nt, synthetic construct
  source 1..22: mol_type = other RNA
gctaacaaacttcagaaaaact

SEQ ID NO: 19657 - RNA, 22 nt, synthetic construct
  source 1..22: mol_type = other RNA
gctatggtgactacctgttttt

SEQ ID NO: 19658 - RNA, 22 nt, synthetic construct
  source 1..22: mol_type = other RNA
gctcaagcaattcttttacctt

SEQ ID NO: 19659 - RNA, 22 nt, synthetic construct
  source 1..22: mol_type = other RNA
gctcatttctttgatttcattt

SEQ ID NO: 19660 - RNA, 22 nt, synthetic construct
  source 1..22: mol_type = other RNA
gctcctcattttttgtcactat

SEQ ID NO: 19661 - RNA, 22 nt, synthetic construct
  source 1..22: mol_type = other RNA
gctcgttgaaggaacaatggat

SEQ ID NO: 19662 - RNA, 22 nt, synthetic construct
  source 1..22: mol_type = other RNA
gctctcaatgctgtgttcctct

SEQ ID NO: 19663 - RNA, 22 nt, synthetic construct
  source 1..22: mol_type = other RNA
gctctttaccatgtgctcgttg

SEQ ID NO: 19664 - RNA, 22 nt, synthetic construct
  source 1..22: mol_type = other RNA
gctgcttgtgacattgaaggta

SEQ ID NO: 19665 - RNA, 22 nt, synthetic construct
  source 1..22: mol_type = other RNA
gctggtctggaaatactgggct

SEQ ID NO: 19666 - RNA, 22 nt, synthetic construct
  source 1..22: mol_type = other RNA
gctgtattataaactacacatt

SEQ ID NO: 19667 - RNA, 22 nt, synthetic construct
  source 1..22: mol_type = other RNA
gctgtgttcctctggtactctg

SEQ ID NO: 19668 - RNA, 22 nt, synthetic construct
  source 1..22: mol_type = other RNA
gcttaatgattaactatgttca

SEQ ID NO: 19669 - RNA, 22 nt, synthetic construct
  source 1..22: mol_type = other RNA
gcttagtaacaattttgataat

SEQ ID NO: 19670 - RNA, 22 nt, synthetic construct
  source 1..22: mol_type = other RNA
gcttcagagagaaagtgttttt

SEQ ID NO: 19671 - RNA, 22 nt, synthetic construct
  source 1..22: mol_type = other RNA
gcttccagaagaaaacagttcc

SEQ ID NO: 19672 - RNA, 22 nt, synthetic construct
  source 1..22: mol_type = other RNA
gcttgagcccagtatttccaga

SEQ ID NO: 19673 - RNA, 22 nt, synthetic construct
  source 1..22: mol_type = other RNA
gcttgcccatcataagtttttc

SEQ ID NO: 19674 - RNA, 22 nt, synthetic construct
  source 1..22: mol_type = other RNA
gcttgtgacattgaaggtattt

SEQ ID NO: 19675 - RNA, 22 nt, synthetic construct
  source 1..22: mol_type = other RNA
gcttttaaaaacaggtagtcac

SEQ ID NO: 19676 - RNA, 22 nt, synthetic construct
  source 1..22: mol_type = other RNA
ggaaaaaagtaatgaattaagt

SEQ ID NO: 19677 - RNA, 22 nt, synthetic construct
  source 1..22: mol_type = other RNA
ggaaacagtgatccattccaaa

SEQ ID NO: 19678 - RNA, 22 nt, synthetic construct
  source 1..22: mol_type = other RNA
ggaaatactgggctcaagcaat

SEQ ID NO: 19679 - RNA, 22 nt, synthetic construct
  source 1..22: mol_type = other RNA
ggaacaatggatatgtggtcat

SEQ ID NO: 19680 - RNA, 22 nt, synthetic construct
  source 1..22: mol_type = other RNA
ggaacacagcattgagagccgt

SEQ ID NO: 19681 - RNA, 22 nt, synthetic construct
  source 1..22: mol_type = other RNA
ggaactgttttcttctggaagc

SEQ ID NO: 19682 - RNA, 22 nt, synthetic construct
  source 1..22: mol_type = other RNA
ggaagaaggttacattcgtgca

SEQ ID NO: 19683 - RNA, 22 nt, synthetic construct
  source 1..22: mol_type = other RNA
ggaagcagacctagacttctta

SEQ ID NO: 19684 - RNA, 22 nt, synthetic construct
  source 1..22: mol_type = other RNA
ggaatggatcactgtttccaaa

SEQ ID NO: 19685 - RNA, 22 nt, synthetic construct
  source 1..22: mol_type = other RNA
ggaccaaactagaattgaatct

SEQ ID NO: 19686 - RNA, 22 nt, synthetic construct
  source 1..22: mol_type = other RNA
ggagaaaagggagtgaaatgtc

SEQ ID NO: 19687 - RNA, 22 nt, synthetic construct
  source 1..22: mol_type = other RNA
ggagaaaggcttcagagagaaa

SEQ ID NO: 19688 - RNA, 22 nt, synthetic construct
  source 1..22: mol_type = other RNA
ggagcatataattatacattga

SEQ ID NO: 19689 - RNA, 22 nt, synthetic construct
  source 1..22: mol_type = other RNA
ggaggccaaggtaaaagaattg

SEQ ID NO: 19690 - RNA, 22 nt, synthetic construct
  source 1..22: mol_type = other RNA
ggagtgaaatgtctttaatgac

SEQ ID NO: 19691 - RNA, 22 nt, synthetic construct
  source 1..22: mol_type = other RNA
ggagtggagaaaggcttcagag

SEQ ID NO: 19692 - RNA, 22 nt, synthetic construct
  source 1..22: mol_type = other RNA
ggatatgtggtcatctaggacc

SEQ ID NO: 19693 - RNA, 22 nt, synthetic construct
  source 1..22: mol_type = other RNA
ggatcactgtttccaaaagaac

SEQ ID NO: 19694 - RNA, 22 nt, synthetic construct
  source 1..22: mol_type = other RNA
ggatggttaagacatataaggt

SEQ ID NO: 19695 - RNA, 22 nt, synthetic construct
  source 1..22: mol_type = other RNA
ggattttgtgacaatatacaag

SEQ ID NO: 19696 - RNA, 22 nt, synthetic construct
  source 1..22: mol_type = other RNA
ggcaaatattggtatatataga

SEQ ID NO: 19697 - RNA, 22 nt, synthetic construct
  source 1..22: mol_type = other RNA
ggcaagctgcttgtgacattga

SEQ ID NO: 19698 - RNA, 22 nt, synthetic construct
  source 1..22: mol_type = other RNA
ggcaatacattaagacatcatc

SEQ ID NO: 19699 - RNA, 22 nt, synthetic construct
  source 1..22: mol_type = other RNA
ggccaaggtaaaagaattgctt

SEQ ID NO: 19700 - RNA, 22 nt, synthetic construct
  source 1..22: mol_type = other RNA
ggctcaagcaattcttttacct

SEQ ID NO: 19701 - RNA, 22 nt, synthetic construct
  source 1..22: mol_type = other RNA
ggctctcaatgctgtgttcctc

SEQ ID NO: 19702 - RNA, 22 nt, synthetic construct
  source 1..22: mol_type = other RNA
ggctctttaccatgtgctcgtt

SEQ ID NO: 19703 - RNA, 22 nt, synthetic construct
  source 1..22: mol_type = other RNA
ggcttaatgattaactatgttc

SEQ ID NO: 19704 - RNA, 22 nt, synthetic construct
  source 1..22: mol_type = other RNA
ggcttcagagagaaagtgtttt

SEQ ID NO: 19705 - RNA, 22 nt, synthetic construct
  source 1..22: mol_type = other RNA
gggaaaaaagtaatgaattaag

SEQ ID NO: 19706 - RNA, 22 nt, synthetic construct
  source 1..22: mol_type = other RNA
gggaggccaaggtaaaagaatt

SEQ ID NO: 19707 - RNA, 22 nt, synthetic construct
  source 1..22: mol_type = other RNA
gggagtgaaatgtctttaatga

SEQ ID NO: 19708 - RNA, 22 nt, synthetic construct
  source 1..22: mol_type = other RNA
gggagtggagaaaggcttcaga

SEQ ID NO: 19709 - RNA, 22 nt, synthetic construct
  source 1..22: mol_type = other RNA
gggattttgtgacaatatacaa

SEQ ID NO: 19710 - RNA, 22 nt, synthetic construct
  source 1..22: mol_type = other RNA
gggcaaatattggtatatatag

SEQ ID NO: 19711 - RNA, 22 nt, synthetic construct
  source 1..22: mol_type = other RNA
gggcaagctgcttgtgacattg

SEQ ID NO: 19712 - RNA, 22 nt, synthetic construct
  source 1..22: mol_type = other RNA
gggcaatacattaagacatcat

SEQ ID NO: 19713 - RNA, 22 nt, synthetic construct
  source 1..22: mol_type = other RNA
gggctcaagcaattcttttacc

SEQ ID NO: 19714 - RNA, 22 nt, synthetic construct
  source 1..22: mol_type = other RNA
ggggaaaaaagtaatgaattaa

SEQ ID NO: 19715 - RNA, 22 nt, synthetic construct
  source 1..22: mol_type = other RNA
ggtaaaagaattgcttgagccc

SEQ ID NO: 19716 - RNA, 22 nt, synthetic construct
  source 1..22: mol_type = other RNA
ggtaaagagcctagaacacaga

SEQ ID NO: 19717 - RNA, 22 nt, synthetic construct
  source 1..22: mol_type = other RNA
ggtaaggttggtaggtgaacat

SEQ ID NO: 19718 - RNA, 22 nt, synthetic construct
  source 1..22: mol_type = other RNA
ggtactctgtataaatcaatgt

SEQ ID NO: 19719 - RNA, 22 nt, synthetic construct
  source 1..22: mol_type = other RNA
ggtaggtgaacatagttaatca

SEQ ID NO: 19720 - RNA, 22 nt, synthetic construct
  source 1..22: mol_type = other RNA
ggtagtcaccatagcattgaat

SEQ ID NO: 19721 - RNA, 22 nt, synthetic construct
  source 1..22: mol_type = other RNA
ggtatatatagagttaagaagt

SEQ ID NO: 19722 - RNA, 22 nt, synthetic construct
  source 1..22: mol_type = other RNA
ggtatttaagattcaattctag

SEQ ID NO: 19723 - RNA, 22 nt, synthetic construct
  source 1..22: mol_type = other RNA
ggtcatctaggaccaaactaga

SEQ ID NO: 19724 - RNA, 22 nt, synthetic construct
  source 1..22: mol_type = other RNA
ggtcctagatgaccacatatcc

SEQ ID NO: 19725 - RNA, 22 nt, synthetic construct
  source 1..22: mol_type = other RNA
ggtctgcttccagaagaaaaca

SEQ ID NO: 19726 - RNA, 22 nt, synthetic construct
  source 1..22: mol_type = other RNA
ggtctggaaatactgggctcaa

SEQ ID NO: 19727 - RNA, 22 nt, synthetic construct
  source 1..22: mol_type = other RNA
ggtgaacatagttaatcattaa

SEQ ID NO: 19728 - RNA, 22 nt, synthetic construct
  source 1..22: mol_type = other RNA
ggtgactacctgtttttaaaag

SEQ ID NO: 19729 - RNA, 22 nt, synthetic construct
  source 1..22: mol_type = other RNA
ggtggtgttacggctctcaatg

SEQ ID NO: 19730 - RNA, 22 nt, synthetic construct
  source 1..22: mol_type = other RNA
ggtgttacggctctcaatgctg

SEQ ID NO: 19731 - RNA, 22 nt, synthetic construct
  source 1..22: mol_type = other RNA
ggttaagacatataaggtgatg

SEQ ID NO: 19732 - RNA, 22 nt, synthetic construct
  source 1..22: mol_type = other RNA
ggttacattcgtgcaagttaac

SEQ ID NO: 19733 - RNA, 22 nt, synthetic construct
  source 1..22: mol_type = other RNA
ggttggtaggtgaacatagtta

SEQ ID NO: 19734 - RNA, 22 nt, synthetic construct
  source 1..22: mol_type = other RNA
gtaaaagaattgcttgagccca

SEQ ID NO: 19735 - RNA, 22 nt, synthetic construct
  source 1..22: mol_type = other RNA
gtaaagagcctagaacacagag

SEQ ID NO: 19736 - RNA, 22 nt, synthetic construct
  source 1..22: mol_type = other RNA
gtaacaccacctgagggagtgg

SEQ ID NO: 19737 - RNA, 22 nt, synthetic construct
  source 1..22: mol_type = other RNA
gtaaccttcttccacattgagt

SEQ ID NO: 19738 - RNA, 22 nt, synthetic construct
  source 1..22: mol_type = other RNA
gtaaggttggtaggtgaacata

SEQ ID NO: 19739 - RNA, 22 nt, synthetic construct
  source 1..22: mol_type = other RNA
gtaagtgtcattaaagacattt

SEQ ID NO: 19740 - RNA, 22 nt, synthetic construct
  source 1..22: mol_type = other RNA
gtaatgaattaagtatgcattt

SEQ ID NO: 19741 - RNA, 22 nt, synthetic construct
  source 1..22: mol_type = other RNA
gtacagtttgagaaatgcatac

SEQ ID NO: 19742 - RNA, 22 nt, synthetic construct
  source 1..22: mol_type = other RNA
gtaccagaggaacacagcattg

SEQ ID NO: 19743 - RNA, 22 nt, synthetic construct
  source 1..22: mol_type = other RNA
gtactctgtataaatcaatgta

SEQ ID NO: 19744 - RNA, 22 nt, synthetic construct
  source 1..22: mol_type = other RNA
gtactttagttcttttggaaac

SEQ ID NO: 19745 - RNA, 22 nt, synthetic construct
  source 1..22: mol_type = other RNA
gtaggtgaacatagttaatcat

SEQ ID NO: 19746 - RNA, 22 nt, synthetic construct
  source 1..22: mol_type = other RNA
gtagtcaccatagcattgaatg

SEQ ID NO: 19747 - RNA, 22 nt, synthetic construct
  source 1..22: mol_type = other RNA
gtagtttataatacagcaaagt

SEQ ID NO: 19748 - RNA, 22 nt, synthetic construct
  source 1..22: mol_type = other RNA
gtataattatatgctcctcatt

SEQ ID NO: 19749 - RNA, 22 nt, synthetic construct
  source 1..22: mol_type = other RNA
gtatatatagagttaagaagtc

SEQ ID NO: 19750 - RNA, 22 nt, synthetic construct
  source 1..22: mol_type = other RNA
gtatattgtcacaaaatcccat

SEQ ID NO: 19751 - RNA, 22 nt, synthetic construct
  source 1..22: mol_type = other RNA
gtatgcatttctcaaactgtac

SEQ ID NO: 19752 - RNA, 22 nt, synthetic construct
  source 1..22: mol_type = other RNA
gtattataaactacacattcaa

SEQ ID NO: 19753 - RNA, 22 nt, synthetic construct
  source 1..22: mol_type = other RNA
gtattgcccatgctggtctgga

SEQ ID NO: 19754 - RNA, 22 nt, synthetic construct
  source 1..22: mol_type = other RNA
gtatttaactttgctgtattat

SEQ ID NO: 19755 - RNA, 22 nt, synthetic construct
  source 1..22: mol_type = other RNA
gtatttaagattcaattctagt

SEQ ID NO: 19756 - RNA, 22 nt, synthetic construct
  source 1..22: mol_type = other RNA
gtatttccagaccagcatgggc

SEQ ID NO: 19757 - RNA, 22 nt, synthetic construct
  source 1..22: mol_type = other RNA
gtcacaaaatcccatatatagt

SEQ ID NO: 19758 - RNA, 22 nt, synthetic construct
  source 1..22: mol_type = other RNA
gtcacaagcagcttgcccatca

SEQ ID NO: 19759 - RNA, 22 nt, synthetic construct
  source 1..22: mol_type = other RNA
gtcaccatagcattgaatgtgt

SEQ ID NO: 19760 - RNA, 22 nt, synthetic construct
  source 1..22: mol_type = other RNA
gtcactataattgttaatatgt

SEQ ID NO: 19761 - RNA, 22 nt, synthetic construct
  source 1..22: mol_type = other RNA
gtcatctaggaccaaactagaa

SEQ ID NO: 19762 - RNA, 22 nt, synthetic construct
  source 1..22: mol_type = other RNA
gtcattaaagacatttcactcc

SEQ ID NO: 19763 - RNA, 22 nt, synthetic construct
  source 1..22: mol_type = other RNA
gtcctagatgaccacatatcca

SEQ ID NO: 19764 - RNA, 22 nt, synthetic construct
  source 1..22: mol_type = other RNA
gtctaggtctgcttccagaaga

SEQ ID NO: 19765 - RNA, 22 nt, synthetic construct
  source 1..22: mol_type = other RNA
gtctctgtgttctaggctcttt

SEQ ID NO: 19766 - RNA, 22 nt, synthetic construct
  source 1..22: mol_type = other RNA
gtctgcttccagaagaaaacag

SEQ ID NO: 19767 - RNA, 22 nt, synthetic construct
  source 1..22: mol_type = other RNA
gtctggaaatactgggctcaag

SEQ ID NO: 19768 - RNA, 22 nt, synthetic construct
  source 1..22: mol_type = other RNA
gtcttaaccatccttgtatatt

SEQ ID NO: 19769 - RNA, 22 nt, synthetic construct
  source 1..22: mol_type = other RNA
gtcttaatgtattgcccatgct

SEQ ID NO: 19770 - RNA, 22 nt, synthetic construct
  source 1..22: mol_type = other RNA
gtctttaatgacacttactata

SEQ ID NO: 19771 - RNA, 22 nt, synthetic construct
  source 1..22: mol_type = other RNA
gtgaaatgtctttaatgacact

SEQ ID NO: 19772 - RNA, 22 nt, synthetic construct
  source 1..22: mol_type = other RNA
gtgaacatagttaatcattaag

SEQ ID NO: 19773 - RNA, 22 nt, synthetic construct
  source 1..22: mol_type = other RNA
gtgacaaaaaatgaggagcata

SEQ ID NO: 19774 - RNA, 22 nt, synthetic construct
  source 1..22: mol_type = other RNA
gtgacaatatacaaggatggtt

SEQ ID NO: 19775 - RNA, 22 nt, synthetic construct
  source 1..22: mol_type = other RNA
gtgacattgaaggtatttaaga

SEQ ID NO: 19776 - RNA, 22 nt, synthetic construct
  source 1..22: mol_type = other RNA
gtgactacctgtttttaaaagc

SEQ ID NO: 19777 - RNA, 22 nt, synthetic construct
  source 1..22: mol_type = other RNA
gtgatccattccaaaaaacact

SEQ ID NO: 19778 - RNA, 22 nt, synthetic construct
  source 1..22: mol_type = other RNA
gtgcaagttaacacggcttaat

SEQ ID NO: 19779 - RNA, 22 nt, synthetic construct
  source 1..22: mol_type = other RNA
gtgctcgttgaaggaacaatgg

SEQ ID NO: 19780 - RNA, 22 nt, synthetic construct
  source 1..22: mol_type = other RNA
gtggaactgttttcttctggaa

SEQ ID NO: 19781 - RNA, 22 nt, synthetic construct
  source 1..22: mol_type = other RNA
gtggaagaaggttacattcgtg

SEQ ID NO: 19782 - RNA, 22 nt, synthetic construct
  source 1..22: mol_type = other RNA
gtggagaaaagggagtgaaatg

SEQ ID NO: 19783 - RNA, 22 nt, synthetic construct
  source 1..22: mol_type = other RNA
gtggagaaaggcttcagagaga

SEQ ID NO: 19784 - RNA, 22 nt, synthetic construct
  source 1..22: mol_type = other RNA
gtggtcatctaggaccaaacta

SEQ ID NO: 19785 - RNA, 22 nt, synthetic construct
  source 1..22: mol_type = other RNA
gtggtgttacggctctcaatgc

SEQ ID NO: 19786 - RNA, 22 nt, synthetic construct
  source 1..22: mol_type = other RNA
gtgtagtttataatacagcaaa

SEQ ID NO: 19787 - RNA, 22 nt, synthetic construct
  source 1..22: mol_type = other RNA
gtgtcattaaagacatttcact

SEQ ID NO: 19788 - RNA, 22 nt, synthetic construct
  source 1..22: mol_type = other RNA
gtgtctctgtgttctaggctct

SEQ ID NO: 19789 - RNA, 22 nt, synthetic construct
  source 1..22: mol_type = other RNA
gtgttaacttgcacgaatgtaa

SEQ ID NO: 19790 - RNA, 22 nt, synthetic construct
  source 1..22: mol_type = other RNA
gtgttacggctctcaatgctgt

SEQ ID NO: 19791 - RNA, 22 nt, synthetic construct
  source 1..22: mol_type = other RNA
gtgttcctctggtactctgtat

SEQ ID NO: 19792 - RNA, 22 nt, synthetic construct
  source 1..22: mol_type = other RNA
gtgttctaggctctttaccatg

SEQ ID NO: 19793 - RNA, 22 nt, synthetic construct
  source 1..22: mol_type = other RNA
gtgttctgtgtctctgtgttct

SEQ ID NO: 19794 - RNA, 22 nt, synthetic construct
  source 1..22: mol_type = other RNA
gtgttttttggaatggatcact

SEQ ID NO: 19795 - RNA, 22 nt, synthetic construct
  source 1..22: mol_type = other RNA
gttaacacggcttaatgattaa

SEQ ID NO: 19796 - RNA, 22 nt, synthetic construct
  source 1..22: mol_type = other RNA
gttaacttgcacgaatgtaacc

SEQ ID NO: 19797 - RNA, 22 nt, synthetic construct
  source 1..22: mol_type = other RNA
gttaagaagtctaggtctgctt

SEQ ID NO: 19798 - RNA, 22 nt, synthetic construct
  source 1..22: mol_type = other RNA
gttaagacatataaggtgatgc

SEQ ID NO: 19799 - RNA, 22 nt, synthetic construct
  source 1..22: mol_type = other RNA
gttaatcattaagccgtgttaa

SEQ ID NO: 19800 - RNA, 22 nt, synthetic construct
  source 1..22: mol_type = other RNA
gttacattcgtgcaagttaaca

SEQ ID NO: 19801 - RNA, 22 nt, synthetic construct
  source 1..22: mol_type = other RNA
gttacggctctcaatgctgtgt

SEQ ID NO: 19802 - RNA, 22 nt, synthetic construct
  source 1..22: mol_type = other RNA
gttactaagctaacaaacttca

SEQ ID NO: 19803 - RNA, 22 nt, synthetic construct
  source 1..22: mol_type = other RNA
gttagatcaatgctaaatgaaa

SEQ ID NO: 19804 - RNA, 22 nt, synthetic construct
  source 1..22: mol_type = other RNA
gttagcttagtaacaattttga

SEQ ID NO: 19805 - RNA, 22 nt, synthetic construct
  source 1..22: mol_type = other RNA
gttagttgctcatttctttgat

SEQ ID NO: 19806 - RNA, 22 nt, synthetic construct
  source 1..22: mol_type = other RNA
gttattaatctcctctttttgt

SEQ ID NO: 19807 - RNA, 22 nt, synthetic construct
  source 1..22: mol_type = other RNA
gttcacctaccaaccttacctt

SEQ ID NO: 19808 - RNA, 22 nt, synthetic construct
  source 1..22: mol_type = other RNA
gttccacgttgcttgaaattga

SEQ ID NO: 19809 - RNA, 22 nt, synthetic construct
  source 1..22: mol_type = other RNA
gttcctctggtactctgtataa

SEQ ID NO: 19810 - RNA, 22 nt, synthetic construct
  source 1..22: mol_type = other RNA
gttccttcaacgagcacatggt

SEQ ID NO: 19811 - RNA, 22 nt, synthetic construct
  source 1..22: mol_type = other RNA
gttctaggctctttaccatgtg

SEQ ID NO: 19812 - RNA, 22 nt, synthetic construct
  source 1..22: mol_type = other RNA
gttctgtgtctctgtgttctag

SEQ ID NO: 19813 - RNA, 22 nt, synthetic construct
  source 1..22: mol_type = other RNA
gttcttttggaaacagtgatcc

SEQ ID NO: 19814 - RNA, 22 nt, synthetic construct
  source 1..22: mol_type = other RNA
gttgaaggaacaatggatatgt

SEQ ID NO: 19815 - RNA, 22 nt, synthetic construct
  source 1..22: mol_type = other RNA
gttgaggggaaaaaagtaatga

SEQ ID NO: 19816 - RNA, 22 nt, synthetic construct
  source 1..22: mol_type = other RNA
gttgctcatttctttgatttca

SEQ ID NO: 19817 - RNA, 22 nt, synthetic construct
  source 1..22: mol_type = other RNA
gttggtaggtgaacatagttaa

SEQ ID NO: 19818 - RNA, 22 nt, synthetic construct
  source 1..22: mol_type = other RNA
gtttataatacagcaaagttaa

SEQ ID NO: 19819 - RNA, 22 nt, synthetic construct
  source 1..22: mol_type = other RNA
gtttatttttgacttgtaaatc

SEQ ID NO: 19820 - RNA, 22 nt, synthetic construct
  source 1..22: mol_type = other RNA
gtttccaaaagaactaaagtac

SEQ ID NO: 19821 - RNA, 22 nt, synthetic construct
  source 1..22: mol_type = other RNA
gtttgagaaatgcatacttaat

SEQ ID NO: 19822 - RNA, 22 nt, synthetic construct
  source 1..22: mol_type = other RNA
gtttggtcctagatgaccacat

SEQ ID NO: 19823 - RNA, 22 nt, synthetic construct
  source 1..22: mol_type = other RNA
gtttgttagcttagtaacaatt

SEQ ID NO: 19824 - RNA, 22 nt, synthetic construct
  source 1..22: mol_type = other RNA
gttttcttctggaagcagacct

SEQ ID NO: 19825 - RNA, 22 nt, synthetic construct
  source 1..22: mol_type = other RNA
gtttttctgaagtttgttagct

SEQ ID NO: 19826 - RNA, 22 nt, synthetic construct
  source 1..22: mol_type = other RNA
gttttttggaatggatcactgt

SEQ ID NO: 19827 - RNA, 22 nt, synthetic construct
  source 1..22: mol_type = other RNA
taaaaacaggtagtcaccatag

SEQ ID NO: 19828 - RNA, 22 nt, synthetic construct
  source 1..22: mol_type = other RNA
taaaagaattgcttgagcccag

SEQ ID NO: 19829 - RNA, 22 nt, synthetic construct
  source 1..22: mol_type = other RNA
taaactacacattcaatgctat

SEQ ID NO: 19830 - RNA, 22 nt, synthetic construct
  source 1..22: mol_type = other RNA
taaacttttttgttgggtaaat

SEQ ID NO: 19831 - RNA, 22 nt, synthetic construct
  source 1..22: mol_type = other RNA
taaagacatttcactccctttt

SEQ ID NO: 19832 - RNA, 22 nt, synthetic construct
  source 1..22: mol_type = other RNA
taaagagcctagaacacagaga

SEQ ID NO: 19833 - RNA, 22 nt, synthetic construct
  source 1..22: mol_type = other RNA
taaagatgatgtcttaatgtat

SEQ ID NO: 19834 - RNA, 22 nt, synthetic construct
  source 1..22: mol_type = other RNA
taaagtacagtttgagaaatgc

SEQ ID NO: 19835 - RNA, 22 nt, synthetic construct
  source 1..22: mol_type = other RNA
taaagttgaggggaaaaaagta

SEQ ID NO: 19836 - RNA, 22 nt, synthetic construct
  source 1..22: mol_type = other RNA
taaataccttcaatgtcacaag

SEQ ID NO: 19837 - RNA, 22 nt, synthetic construct
  source 1..22: mol_type = other RNA
taaatgaaatcaaagaaatgag

SEQ ID NO: 19838 - RNA, 22 nt, synthetic construct
  source 1..22: mol_type = other RNA
taaatttacccaacaaaaaagt

SEQ ID NO: 19839 - RNA, 22 nt, synthetic construct
  source 1..22: mol_type = other RNA
taacaaaaagaggagattaata

SEQ ID NO: 19840 - RNA, 22 nt, synthetic construct
  source 1..22: mol_type = other RNA
taacaaacttcagaaaaactta

SEQ ID NO: 19841 - RNA, 22 nt, synthetic construct
  source 1..22: mol_type = other RNA
taacaccacctgagggagtgga

SEQ ID NO: 19842 - RNA, 22 nt, synthetic construct
  source 1..22: mol_type = other RNA
taacacggcttaatgattaact

SEQ ID NO: 19843 - RNA, 22 nt, synthetic construct
  source 1..22: mol_type = other RNA
taaccatccttgtatattgtca

SEQ ID NO: 19844 - RNA, 22 nt, synthetic construct
  source 1..22: mol_type = other RNA
taaccttcttccacattgagtt

SEQ ID NO: 19845 - RNA, 22 nt, synthetic construct
  source 1..22: mol_type = other RNA
taactatgttcacctaccaacc

SEQ ID NO: 19846 - RNA, 22 nt, synthetic construct
  source 1..22: mol_type = other RNA
taactcaatgtggaagaaggtt

SEQ ID NO: 19847 - RNA, 22 nt, synthetic construct
  source 1..22: mol_type = other RNA
taacttgcacgaatgtaacctt

SEQ ID NO: 19848 - RNA, 22 nt, synthetic construct
  source 1..22: mol_type = other RNA
taactttgctgtattataaact

SEQ ID NO: 19849 - RNA, 22 nt, synthetic construct
  source 1..22: mol_type = other RNA
taagaagtctaggtctgcttcc

SEQ ID NO: 19850 - RNA, 22 nt, synthetic construct
  source 1..22: mol_type = other RNA
taagacatataaggtgatgcaa

SEQ ID NO: 19851 - RNA, 22 nt, synthetic construct
  source 1..22: mol_type = other RNA
taagagatttacaagtcaaaaa

SEQ ID NO: 19852 - RNA, 22 nt, synthetic construct
  source 1..22: mol_type = other RNA
taagattcaattctagtttggt

SEQ ID NO: 19853 - RNA, 22 nt, synthetic construct
  source 1..22: mol_type = other RNA
taagccgtgttaacttgcacga

SEQ ID NO: 19854 - RNA, 22 nt, synthetic construct
  source 1..22: mol_type = other RNA
taagctaacaaacttcagaaaa

SEQ ID NO: 19855 - RNA, 22 nt, synthetic construct
  source 1..22: mol_type = other RNA
taaggttggtaggtgaacatag

SEQ ID NO: 19856 - RNA, 22 nt, synthetic construct
  source 1..22: mol_type = other RNA
taagtatgcatttctcaaactg

SEQ ID NO: 19857 - RNA, 22 nt, synthetic construct
  source 1..22: mol_type = other RNA
taagtgtcattaaagacatttc

SEQ ID NO: 19858 - RNA, 22 nt, synthetic construct
  source 1..22: mol_type = other RNA
taagttagttgctcatttcttt

SEQ ID NO: 19859 - RNA, 22 nt, synthetic construct
  source 1..22: mol_type = other RNA
taagtttttctgaagtttgtta

SEQ ID NO: 19860 - RNA, 22 nt, synthetic construct
  source 1..22: mol_type = other RNA
taatacagcaaagttaaataca

SEQ ID NO: 19861 - RNA, 22 nt, synthetic construct
  source 1..22: mol_type = other RNA
taatcattaagccgtgttaact

SEQ ID NO: 19862 - RNA, 22 nt, synthetic construct
  source 1..22: mol_type = other RNA
taatctcctctttttgttaaat

SEQ ID NO: 19863 - RNA, 22 nt, synthetic construct
  source 1..22: mol_type = other RNA
taatgaattaagtatgcatttc

SEQ ID NO: 19864 - RNA, 22 nt, synthetic construct
  source 1..22: mol_type = other RNA
taatgacacttactatatatgg

SEQ ID NO: 19865 - RNA, 22 nt, synthetic construct
  source 1..22: mol_type = other RNA
taatgattaactatgttcacct

SEQ ID NO: 19866 - RNA, 22 nt, synthetic construct
  source 1..22: mol_type = other RNA
taatgtattgcccatgctggtc

SEQ ID NO: 19867 - RNA, 22 nt, synthetic construct
  source 1..22: mol_type = other RNA
taattatatgctcctcattttt

SEQ ID NO: 19868 - RNA, 22 nt, synthetic construct
  source 1..22: mol_type = other RNA
taattcattacttttttcccct

SEQ ID NO: 19869 - RNA, 22 nt, synthetic construct
  source 1..22: mol_type = other RNA
tacaaggatggttaagacatat

SEQ ID NO: 19870 - RNA, 22 nt, synthetic construct
  source 1..22: mol_type = other RNA
tacacattcaatgctatggtga

SEQ ID NO: 19871 - RNA, 22 nt, synthetic construct
  source 1..22: mol_type = other RNA
tacagagtaccagaggaacaca

SEQ ID NO: 19872 - RNA, 22 nt, synthetic construct
  source 1..22: mol_type = other RNA
tacagcaaagttaaatacaatt

SEQ ID NO: 19873 - RNA, 22 nt, synthetic construct
  source 1..22: mol_type = other RNA
tacagtttgagaaatgcatact

SEQ ID NO: 19874 - RNA, 22 nt, synthetic construct
  source 1..22: mol_type = other RNA
tacattaagacatcatctttaa

SEQ ID NO: 19875 - RNA, 22 nt, synthetic construct
  source 1..22: mol_type = other RNA
tacattcgtgcaagttaacacg

SEQ ID NO: 19876 - RNA, 22 nt, synthetic construct
  source 1..22: mol_type = other RNA
tacattgatttatacagagtac

SEQ ID NO: 19877 - RNA, 22 nt, synthetic construct
  source 1..22: mol_type = other RNA
tacatttaacaaaaagaggaga

SEQ ID NO: 19878 - RNA, 22 nt, synthetic construct
  source 1..22: mol_type = other RNA
taccaaccttaccttttctggg

SEQ ID NO: 19879 - RNA, 22 nt, synthetic construct
  source 1..22: mol_type = other RNA
taccaatatttgcccagaaaag

SEQ ID NO: 19880 - RNA, 22 nt, synthetic construct
  source 1..22: mol_type = other RNA
taccagaggaacacagcattga

SEQ ID NO: 19881 - RNA, 22 nt, synthetic construct
  source 1..22: mol_type = other RNA
taccatgtgctcgttgaaggaa

SEQ ID NO: 19882 - RNA, 22 nt, synthetic construct
  source 1..22: mol_type = other RNA
tacccaacaaaaaagtttattt

SEQ ID NO: 19883 - RNA, 22 nt, synthetic construct
  source 1..22: mol_type = other RNA
tacctattaagttagttgctca

SEQ ID NO: 19884 - RNA, 22 nt, synthetic construct
  source 1..22: mol_type = other RNA
tacctgtttttaaaagctaatt

SEQ ID NO: 19885 - RNA, 22 nt, synthetic construct
  source 1..22: mol_type = other RNA
taccttcaatgtcacaagcagc

SEQ ID NO: 19886 - RNA, 22 nt, synthetic construct
  source 1..22: mol_type = other RNA
taccttttctgggcaaatattg

SEQ ID NO: 19887 - RNA, 22 nt, synthetic construct
  source 1..22: mol_type = other RNA
tacggctctcaatgctgtgttc

SEQ ID NO: 19888 - RNA, 22 nt, synthetic construct
  source 1..22: mol_type = other RNA
tactaagctaacaaacttcaga

SEQ ID NO: 19889 - RNA, 22 nt, synthetic construct
  source 1..22: mol_type = other RNA
tactatatatgggattttgtga

SEQ ID NO: 19890 - RNA, 22 nt, synthetic construct
  source 1..22: mol_type = other RNA
tactctgtataaatcaatgtat

SEQ ID NO: 19891 - RNA, 22 nt, synthetic construct
  source 1..22: mol_type = other RNA
tactgggctcaagcaattcttt

SEQ ID NO: 19892 - RNA, 22 nt, synthetic construct
  source 1..22: mol_type = other RNA
tactttagttcttttggaaaca

SEQ ID NO: 19893 - RNA, 22 nt, synthetic construct
  source 1..22: mol_type = other RNA
tacttttttcccctcaacttta

SEQ ID NO: 19894 - RNA, 22 nt, synthetic construct
  source 1..22: mol_type = other RNA
tagaacacagagacacagaaca

SEQ ID NO: 19895 - RNA, 22 nt, synthetic construct
  source 1..22: mol_type = other RNA
tagaattgaatcttaaatacct

SEQ ID NO: 19896 - RNA, 22 nt, synthetic construct
  source 1..22: mol_type = other RNA
tagacttcttaactctatatat

SEQ ID NO: 19897 - RNA, 22 nt, synthetic construct
  source 1..22: mol_type = other RNA
tagagttaagaagtctaggtct

SEQ ID NO: 19898 - RNA, 22 nt, synthetic construct
  source 1..22: mol_type = other RNA
tagatcaatgctaaatgaaatc

SEQ ID NO: 19899 - RNA, 22 nt, synthetic construct
  source 1..22: mol_type = other RNA
tagatgaccacatatccattgt

SEQ ID NO: 19900 - RNA, 22 nt, synthetic construct
  source 1..22: mol_type = other RNA
tagcattgaatgtgtagtttat

SEQ ID NO: 19901 - RNA, 22 nt, synthetic construct
  source 1..22: mol_type = other RNA
tagcattgatctaactcaatgt

SEQ ID NO: 19902 - RNA, 22 nt, synthetic construct
  source 1..22: mol_type = other RNA
tagcttagtaacaattttgata

SEQ ID NO: 19903 - RNA, 22 nt, synthetic construct
  source 1..22: mol_type = other RNA
tagcttttaaaaacaggtagtc

SEQ ID NO: 19904 - RNA, 22 nt, synthetic construct
  source 1..22: mol_type = other RNA
taggaccaaactagaattgaat

SEQ ID NO: 19905 - RNA, 22 nt, synthetic construct
  source 1..22: mol_type = other RNA
taggctctttaccatgtgctcg

SEQ ID NO: 19906 - RNA, 22 nt, synthetic construct
  source 1..22: mol_type = other RNA
taggtctgcttccagaagaaaa

SEQ ID NO: 19907 - RNA, 22 nt, synthetic construct
  source 1..22: mol_type = other RNA
taggtgaacatagttaatcatt

SEQ ID NO: 19908 - RNA, 22 nt, synthetic construct
  source 1..22: mol_type = other RNA
tagtaagtgtcattaaagacat

SEQ ID NO: 19909 - RNA, 22 nt, synthetic construct
  source 1..22: mol_type = other RNA
tagtcaccatagcattgaatgt

SEQ ID NO: 19910 - RNA, 22 nt, synthetic construct
  source 1..22: mol_type = other RNA
tagtgacaaaaaatgaggagca

SEQ ID NO: 19911 - RNA, 22 nt, synthetic construct
  source 1..22: mol_type = other RNA
tagttaatcattaagccgtgtt

SEQ ID NO: 19912 - RNA, 22 nt, synthetic construct
  source 1..22: mol_type = other RNA
tagttcttttggaaacagtgat

SEQ ID NO: 19913 - RNA, 22 nt, synthetic construct
  source 1..22: mol_type = other RNA
tagttgctcatttctttgattt

SEQ ID NO: 19914 - RNA, 22 nt, synthetic construct
  source 1..22: mol_type = other RNA
tagtttataatacagcaaagtt

SEQ ID NO: 19915 - RNA, 22 nt, synthetic construct
  source 1..22: mol_type = other RNA
tagtttggtcctagatgaccac

SEQ ID NO: 19916 - RNA, 22 nt, synthetic construct
  source 1..22: mol_type = other RNA
tataaactacacattcaatgct

SEQ ID NO: 19917 - RNA, 22 nt, synthetic construct
  source 1..22: mol_type = other RNA
tataattatatgctcctcattt

SEQ ID NO: 19918 - RNA, 22 nt, synthetic construct
  source 1..22: mol_type = other RNA
tatacaaggatggttaagacat

SEQ ID NO: 19919 - RNA, 22 nt, synthetic construct
  source 1..22: mol_type = other RNA
tatacagagtaccagaggaaca

SEQ ID NO: 19920 - RNA, 22 nt, synthetic construct
  source 1..22: mol_type = other RNA
tatacattgatttatacagagt

SEQ ID NO: 19921 - RNA, 22 nt, synthetic construct
  source 1..22: mol_type = other RNA
tatacatttaacaaaaagagga

SEQ ID NO: 19922 - RNA, 22 nt, synthetic construct
  source 1..22: mol_type = other RNA
tataccaatatttgcccagaaa

SEQ ID NO: 19923 - RNA, 22 nt, synthetic construct
  source 1..22: mol_type = other RNA
tatagagttaagaagtctaggt

SEQ ID NO: 19924 - RNA, 22 nt, synthetic construct
  source 1..22: mol_type = other RNA
tatagtaagtgtcattaaagac

SEQ ID NO: 19925 - RNA, 22 nt, synthetic construct
  source 1..22: mol_type = other RNA
tatagtgacaaaaaatgaggag

SEQ ID NO: 19926 - RNA, 22 nt, synthetic construct
  source 1..22: mol_type = other RNA
tatataccaatatttgcccaga

SEQ ID NO: 19927 - RNA, 22 nt, synthetic construct
  source 1..22: mol_type = other RNA
tatatagagttaagaagtctag

SEQ ID NO: 19928 - RNA, 22 nt, synthetic construct
  source 1..22: mol_type = other RNA
tatatagtaagtgtcattaaag

SEQ ID NO: 19929 - RNA, 22 nt, synthetic construct
  source 1..22: mol_type = other RNA
tatatataccaatatttgccca

SEQ ID NO: 19930 - RNA, 22 nt, synthetic construct
  source 1..22: mol_type = other RNA
tatatatagagttaagaagtct

SEQ ID NO: 19931 - RNA, 22 nt, synthetic construct
  source 1..22: mol_type = other RNA
tatatatgggattttgtgacaa

SEQ ID NO: 19932 - RNA, 22 nt, synthetic construct
  source 1..22: mol_type = other RNA
tatatgctcctcattttttgtc

SEQ ID NO: 19933 - RNA, 22 nt, synthetic construct
  source 1..22: mol_type = other RNA
tatatgggattttgtgacaata

SEQ ID NO: 19934 - RNA, 22 nt, synthetic construct
  source 1..22: mol_type = other RNA
tatatgtcttaaccatccttgt

SEQ ID NO: 19935 - RNA, 22 nt, synthetic construct
  source 1..22: mol_type = other RNA
tatattgtcacaaaatcccata

SEQ ID NO: 19936 - RNA, 22 nt, synthetic construct
  source 1..22: mol_type = other RNA
tatcaaaattgttactaagcta

SEQ ID NO: 19937 - RNA, 22 nt, synthetic construct
  source 1..22: mol_type = other RNA
tatccattgttccttcaacgag

SEQ ID NO: 19938 - RNA, 22 nt, synthetic construct
  source 1..22: mol_type = other RNA
tatcttgattttcaatttcaag

SEQ ID NO: 19939 - RNA, 22 nt, synthetic construct
  source 1..22: mol_type = other RNA
tatgatgggcaagctgcttgtg

SEQ ID NO: 19940 - RNA, 22 nt, synthetic construct
  source 1..22: mol_type = other RNA
tatgcatttctcaaactgtact

SEQ ID NO: 19941 - RNA, 22 nt, synthetic construct
  source 1..22: mol_type = other RNA
tatgctcctcattttttgtcac

SEQ ID NO: 19942 - RNA, 22 nt, synthetic construct
  source 1..22: mol_type = other RNA
tatgggattttgtgacaatata

SEQ ID NO: 19943 - RNA, 22 nt, synthetic construct
  source 1..22: mol_type = other RNA
tatggtgactacctgtttttaa

SEQ ID NO: 19944 - RNA, 22 nt, synthetic construct
  source 1..22: mol_type = other RNA
tatgtcttaaccatccttgtat

SEQ ID NO: 19945 - RNA, 22 nt, synthetic construct
  source 1..22: mol_type = other RNA
tatgtggtcatctaggaccaaa

SEQ ID NO: 19946 - RNA, 22 nt, synthetic construct
  source 1..22: mol_type = other RNA
tatgttcacctaccaaccttac

SEQ ID NO: 19947 - RNA, 22 nt, synthetic construct
  source 1..22: mol_type = other RNA
tattaaagttgaggggaaaaaa

SEQ ID NO: 19948 - RNA, 22 nt, synthetic construct
  source 1..22: mol_type = other RNA
tattaagttagttgctcatttc

SEQ ID NO: 19949 - RNA, 22 nt, synthetic construct
  source 1..22: mol_type = other RNA
tattaatctcctctttttgtta

SEQ ID NO: 19950 - RNA, 22 nt, synthetic construct
  source 1..22: mol_type = other RNA
tattattaaagttgaggggaaa

SEQ ID NO: 19951 - RNA, 22 nt, synthetic construct
  source 1..22: mol_type = other RNA
tattgcccatgctggtctggaa

SEQ ID NO: 19952 - RNA, 22 nt, synthetic construct
  source 1..22: mol_type = other RNA
tattggtatatatagagttaag

SEQ ID NO: 19953 - RNA, 22 nt, synthetic construct
  source 1..22: mol_type = other RNA
tattgtcacaaaatcccatata

SEQ ID NO: 19954 - RNA, 22 nt, synthetic construct
  source 1..22: mol_type = other RNA
tatttccagaccagcatgggca

SEQ ID NO: 19955 - RNA, 22 nt, synthetic construct
  source 1..22: mol_type = other RNA
tatttgcccagaaaaggtaagg

SEQ ID NO: 19956 - RNA, 22 nt, synthetic construct
  source 1..22: mol_type = other RNA
tatttttgacttgtaaatctct

SEQ ID NO: 19957 - RNA, 22 nt, synthetic construct
  source 1..22: mol_type = other RNA
tcaaaattgttactaagctaac

SEQ ID NO: 19958 - RNA, 22 nt, synthetic construct
  source 1..22: mol_type = other RNA
tcaaactgtactttagttcttt

SEQ ID NO: 19959 - RNA, 22 nt, synthetic construct
  source 1..22: mol_type = other RNA
tcaaagaaatgagcaactaact

SEQ ID NO: 19960 - RNA, 22 nt, synthetic construct
  source 1..22: mol_type = other RNA
tcaaattacctattaagttagt

SEQ ID NO: 19961 - RNA, 22 nt, synthetic construct
  source 1..22: mol_type = other RNA
tcaacgagcacatggtaaagag

SEQ ID NO: 19962 - RNA, 22 nt, synthetic construct
  source 1..22: mol_type = other RNA
tcaagcaacgtggaactgtttt

SEQ ID NO: 19963 - RNA, 22 nt, synthetic construct
  source 1..22: mol_type = other RNA
tcaatgctaaatgaaatcaaag

SEQ ID NO: 19964 - RNA, 22 nt, synthetic construct
  source 1..22: mol_type = other RNA
tcaatgctatggtgactacctg

SEQ ID NO: 19965 - RNA, 22 nt, synthetic construct
  source 1..22: mol_type = other RNA
tcaatgctgtgttcctctggta

SEQ ID NO: 19966 - RNA, 22 nt, synthetic construct
  source 1..22: mol_type = other RNA
tcaatgtataattatatgctcc

SEQ ID NO: 19967 - RNA, 22 nt, synthetic construct
  source 1..22: mol_type = other RNA
tcaatgtcacaagcagcttgcc

SEQ ID NO: 19968 - RNA, 22 nt, synthetic construct
  source 1..22: mol_type = other RNA
tcaatgtggaagaaggttacat

SEQ ID NO: 19969 - RNA, 22 nt, synthetic construct
  source 1..22: mol_type = other RNA
tcaattctagtttggtcctaga

SEQ ID NO: 19970 - RNA, 22 nt, synthetic construct
  source 1..22: mol_type = other RNA
tcaatttcaagcaacgtggaac

SEQ ID NO: 19971 - RNA, 22 nt, synthetic construct
  source 1..22: mol_type = other RNA
tcacaaaatcccatatatagta

SEQ ID NO: 19972 - RNA, 22 nt, synthetic construct
  source 1..22: mol_type = other RNA
tcacaagcagcttgcccatcat

SEQ ID NO: 19973 - RNA, 22 nt, synthetic construct
  source 1..22: mol_type = other RNA
tcaccatagcattgaatgtgta

SEQ ID NO: 19974 - RNA, 22 nt, synthetic construct
  source 1..22: mol_type = other RNA
tcacctaccaaccttacctttt

SEQ ID NO: 19975 - RNA, 22 nt, synthetic construct
  source 1..22: mol_type = other RNA
tcaccttatatgtcttaaccat

SEQ ID NO: 19976 - RNA, 22 nt, synthetic construct
  source 1..22: mol_type = other RNA
tcactcccttttctccactgtg

SEQ ID NO: 19977 - RNA, 22 nt, synthetic construct
  source 1..22: mol_type = other RNA
tcactgtttccaaaagaactaa

SEQ ID NO: 19978 - RNA, 22 nt, synthetic construct
  source 1..22: mol_type = other RNA
tcagaaaaacttatgatgggca

SEQ ID NO: 19979 - RNA, 22 nt, synthetic construct
  source 1..22: mol_type = other RNA
tcagagagaaagtgttttttgg

SEQ ID NO: 19980 - RNA, 22 nt, synthetic construct
  source 1..22: mol_type = other RNA
tcaggtggtgttacggctctca

SEQ ID NO: 19981 - RNA, 22 nt, synthetic construct
  source 1..22: mol_type = other RNA
tcataagtttttctgaagtttg

SEQ ID NO: 19982 - RNA, 22 nt, synthetic construct
  source 1..22: mol_type = other RNA
tcatctaggaccaaactagaat

SEQ ID NO: 19983 - RNA, 22 nt, synthetic construct
  source 1..22: mol_type = other RNA
tcattaaagacatttcactccc

SEQ ID NO: 19984 - RNA, 22 nt, synthetic construct
  source 1..22: mol_type = other RNA
tcattaagccgtgttaacttgc

SEQ ID NO: 19985 - RNA, 22 nt, synthetic construct
  source 1..22: mol_type = other RNA
tcattacttttttcccctcaac

SEQ ID NO: 19986 - RNA, 22 nt, synthetic construct
  source 1..22: mol_type = other RNA
tcatttagcattgatctaactc

SEQ ID NO: 19987 - RNA, 22 nt, synthetic construct
  source 1..22: mol_type = other RNA
tcatttctttgatttcatttag

SEQ ID NO: 19988 - RNA, 22 nt, synthetic construct
  source 1..22: mol_type = other RNA
tcattttttgtcactataattg

SEQ ID NO: 19989 - RNA, 22 nt, synthetic construct
  source 1..22: mol_type = other RNA
tccaaaaaacactttctctctg

SEQ ID NO: 19990 - RNA, 22 nt, synthetic construct
  source 1..22: mol_type = other RNA
tccaaaagaactaaagtacagt

SEQ ID NO: 19991 - RNA, 22 nt, synthetic construct
  source 1..22: mol_type = other RNA
tccacattgagttagatcaatg

SEQ ID NO: 19992 - RNA, 22 nt, synthetic construct
  source 1..22: mol_type = other RNA
tccacgttgcttgaaattgaaa

SEQ ID NO: 19993 - RNA, 22 nt, synthetic construct
  source 1..22: mol_type = other RNA
tccactccctcaggtggtgtta

SEQ ID NO: 19994 - RNA, 22 nt, synthetic construct
  source 1..22: mol_type = other RNA
tccactgtgttctgtgtctctg

SEQ ID NO: 19995 - RNA, 22 nt, synthetic construct
  source 1..22: mol_type = other RNA
tccagaagaaaacagttccacg

SEQ ID NO: 19996 - RNA, 22 nt, synthetic construct
  source 1..22: mol_type = other RNA
tccagaccagcatgggcaatac

SEQ ID NO: 19997 - RNA, 22 nt, synthetic construct
  source 1..22: mol_type = other RNA
tccattccaaaaaacactttct

SEQ ID NO: 19998 - RNA, 22 nt, synthetic construct
  source 1..22: mol_type = other RNA
tccattgttccttcaacgagca

SEQ ID NO: 19999 - RNA, 22 nt, synthetic construct
  source 1..22: mol_type = other RNA
tcccatatatagtaagtgtcat

SEQ ID NO: 20000 - RNA, 22 nt, synthetic construct
  source 1..22: mol_type = other RNA
tcccctcaactttaataataaa

SEQ ID NO: 20001 - RNA, 22 nt, synthetic construct
  source 1..22: mol_type = other RNA
tccctcaggtggtgttacggct

SEQ ID NO: 20002 - RNA, 22 nt, synthetic construct
  source 1..22: mol_type = other RNA
tcccttttctccactgtgttct

SEQ ID NO: 20003 - RNA, 22 nt, synthetic construct
  source 1..22: mol_type = other RNA
tcctagatgaccacatatccat

SEQ ID NO: 20004 - RNA, 22 nt, synthetic construct
  source 1..22: mol_type = other RNA
tcctcattttttgtcactataa

SEQ ID NO: 20005 - RNA, 22 nt, synthetic construct
  source 1..22: mol_type = other RNA
tcctctggtactctgtataaat

SEQ ID NO: 20006 - RNA, 22 nt, synthetic construct
  source 1..22: mol_type = other RNA
tcctctttttgttaaatgtata

SEQ ID NO: 20007 - RNA, 22 nt, synthetic construct
  source 1..22: mol_type = other RNA
tccttcaacgagcacatggtaa

SEQ ID NO: 20008 - RNA, 22 nt, synthetic construct
  source 1..22: mol_type = other RNA
tccttgtatattgtcacaaaat

SEQ ID NO: 20009 - RNA, 22 nt, synthetic construct
  source 1..22: mol_type = other RNA
tcgtgcaagttaacacggctta

SEQ ID NO: 20010 - RNA, 22 nt, synthetic construct
  source 1..22: mol_type = other RNA
tcgttgaaggaacaatggatat

SEQ ID NO: 20011 - RNA, 22 nt, synthetic construct
  source 1..22: mol_type = other RNA
tctaactcaatgtggaagaagg

SEQ ID NO: 20012 - RNA, 22 nt, synthetic construct
  source 1..22: mol_type = other RNA
tctaggaccaaactagaattga

SEQ ID NO: 20013 - RNA, 22 nt, synthetic construct
  source 1..22: mol_type = other RNA
tctaggctctttaccatgtgct

SEQ ID NO: 20014 - RNA, 22 nt, synthetic construct
  source 1..22: mol_type = other RNA
tctaggtctgcttccagaagaa

SEQ ID NO: 20015 - RNA, 22 nt, synthetic construct
  source 1..22: mol_type = other RNA
tctagtttggtcctagatgacc

SEQ ID NO: 20016 - RNA, 22 nt, synthetic construct
  source 1..22: mol_type = other RNA
tctatatataccaatatttgcc

SEQ ID NO: 20017 - RNA, 22 nt, synthetic construct
  source 1..22: mol_type = other RNA
tctcaaactgtactttagttct

SEQ ID NO: 20018 - RNA, 22 nt, synthetic construct
  source 1..22: mol_type = other RNA
tctcaatgctgtgttcctctgg

SEQ ID NO: 20019 - RNA, 22 nt, synthetic construct
  source 1..22: mol_type = other RNA
tctccactccctcaggtggtgt

SEQ ID NO: 20020 - RNA, 22 nt, synthetic construct
  source 1..22: mol_type = other RNA
tctccactgtgttctgtgtctc

SEQ ID NO: 20021 - RNA, 22 nt, synthetic construct
  source 1..22: mol_type = other RNA
tctcctctttttgttaaatgta

SEQ ID NO: 20022 - RNA, 22 nt, synthetic construct
  source 1..22: mol_type = other RNA
tctctctgaagcctttctccac

SEQ ID NO: 20023 - RNA, 22 nt, synthetic construct
  source 1..22: mol_type = other RNA
tctctgaagcctttctccactc

SEQ ID NO: 20024 - RNA, 22 nt, synthetic construct
  source 1..22: mol_type = other RNA
tctctgtgttctaggctcttta

SEQ ID NO: 20025 - RNA, 22 nt, synthetic construct
  source 1..22: mol_type = other RNA
tctgaagcctttctccactccc

SEQ ID NO: 20026 - RNA, 22 nt, synthetic construct
  source 1..22: mol_type = other RNA
tctgaagtttgttagcttagta

SEQ ID NO: 20027 - RNA, 22 nt, synthetic construct
  source 1..22: mol_type = other RNA
tctgcttccagaagaaaacagt

SEQ ID NO: 20028 - RNA, 22 nt, synthetic construct
  source 1..22: mol_type = other RNA
tctggaaatactgggctcaagc

SEQ ID NO: 20029 - RNA, 22 nt, synthetic construct
  source 1..22: mol_type = other RNA
tctggaagcagacctagacttc

SEQ ID NO: 20030 - RNA, 22 nt, synthetic construct
  source 1..22: mol_type = other RNA
tctgggcaaatattggtatata

SEQ ID NO: 20031 - RNA, 22 nt, synthetic construct
  source 1..22: mol_type = other RNA
tctggtactctgtataaatcaa

SEQ ID NO: 20032 - RNA, 22 nt, synthetic construct
  source 1..22: mol_type = other RNA
tctgtgtctctgtgttctaggc

SEQ ID NO: 20033 - RNA, 22 nt, synthetic construct
  source 1..22: mol_type = other RNA
tctgtgttctaggctctttacc

SEQ ID NO: 20034 - RNA, 22 nt, synthetic construct
  source 1..22: mol_type = other RNA
tcttaaataccttcaatgtcac

SEQ ID NO: 20035 - RNA, 22 nt, synthetic construct
  source 1..22: mol_type = other RNA
tcttaaccatccttgtatattg

SEQ ID NO: 20036 - RNA, 22 nt, synthetic construct
  source 1..22: mol_type = other RNA
tcttaactctatatataccaat

SEQ ID NO: 20037 - RNA, 22 nt, synthetic construct
  source 1..22: mol_type = other RNA
tcttaatgtattgcccatgctg

SEQ ID NO: 20038 - RNA, 22 nt, synthetic construct
  source 1..22: mol_type = other RNA
tcttccacattgagttagatca

SEQ ID NO: 20039 - RNA, 22 nt, synthetic construct
  source 1..22: mol_type = other RNA
tcttctggaagcagacctagac

SEQ ID NO: 20040 - RNA, 22 nt, synthetic construct
  source 1..22: mol_type = other RNA
tcttgattttcaatttcaagca

SEQ ID NO: 20041 - RNA, 22 nt, synthetic construct
  source 1..22: mol_type = other RNA
tctttaatgacacttactatat

SEQ ID NO: 20042 - RNA, 22 nt, synthetic construct
  source 1..22: mol_type = other RNA
tctttaccatgtgctcgttgaa

SEQ ID NO: 20043 - RNA, 22 nt, synthetic construct
  source 1..22: mol_type = other RNA
tctttgatttcatttagcattg

SEQ ID NO: 20044 - RNA, 22 nt, synthetic construct
  source 1..22: mol_type = other RNA
tcttttggaaacagtgatccat

SEQ ID NO: 20045 - RNA, 22 nt, synthetic construct
  source 1..22: mol_type = other RNA
tgaaatcaaagaaatgagcaac

SEQ ID NO: 20046 - RNA, 22 nt, synthetic construct
  source 1..22: mol_type = other RNA
tgaaatgtctttaatgacactt

SEQ ID NO: 20047 - RNA, 22 nt, synthetic construct
  source 1..22: mol_type = other RNA
tgaaattgtatttaactttgct

SEQ ID NO: 20048 - RNA, 22 nt, synthetic construct
  source 1..22: mol_type = other RNA
tgaacatagttaatcattaagc

SEQ ID NO: 20049 - RNA, 22 nt, synthetic construct
  source 1..22: mol_type = other RNA
tgaagcctttctccactccctc

SEQ ID NO: 20050 - RNA, 22 nt, synthetic construct
  source 1..22: mol_type = other RNA
tgaaggaacaatggatatgtgg

SEQ ID NO: 20051 - RNA, 22 nt, synthetic construct
  source 1..22: mol_type = other RNA
tgaaggtatttaagattcaatt

SEQ ID NO: 20052 - RNA, 22 nt, synthetic construct
  source 1..22: mol_type = other RNA
tgaagtttgttagcttagtaac

SEQ ID NO: 20053 - RNA, 22 nt, synthetic construct
  source 1..22: mol_type = other RNA
tgaatcttaaataccttcaatg

SEQ ID NO: 20054 - RNA, 22 nt, synthetic construct
  source 1..22: mol_type = other RNA
tgaatgtgtagtttataataca

SEQ ID NO: 20055 - RNA, 22 nt, synthetic construct
  source 1..22: mol_type = other RNA
tgaattaagtatgcatttctca

SEQ ID NO: 20056 - RNA, 22 nt, synthetic construct
  source 1..22: mol_type = other RNA
tgacaaaaaatgaggagcatat

SEQ ID NO: 20057 - RNA, 22 nt, synthetic construct
  source 1..22: mol_type = other RNA
tgacaatatacaaggatggtta

SEQ ID NO: 20058 - RNA, 22 nt, synthetic construct
  source 1..22: mol_type = other RNA
tgacacttactatatatgggat

SEQ ID NO: 20059 - RNA, 22 nt, synthetic construct
  source 1..22: mol_type = other RNA
tgacattgaaggtatttaagat

SEQ ID NO: 20060 - RNA, 22 nt, synthetic construct
  source 1..22: mol_type = other RNA
tgaccacatatccattgttcct

SEQ ID NO: 20061 - RNA, 22 nt, synthetic construct
  source 1..22: mol_type = other RNA
tgactacctgtttttaaaagct

SEQ ID NO: 20062 - RNA, 22 nt, synthetic construct
  source 1..22: mol_type = other RNA
tgacttgtaaatctcttaaaat

SEQ ID NO: 20063 - RNA, 22 nt, synthetic construct
  source 1..22: mol_type = other RNA
tgagaaatgcatacttaattca

SEQ ID NO: 20064 - RNA, 22 nt, synthetic construct
  source 1..22: mol_type = other RNA
tgagagccgtaacaccacctga

SEQ ID NO: 20065 - RNA, 22 nt, synthetic construct
  source 1..22: mol_type = other RNA
tgagcaactaacttaataggta

SEQ ID NO: 20066 - RNA, 22 nt, synthetic construct
  source 1..22: mol_type = other RNA
tgagcccagtatttccagacca

SEQ ID NO: 20067 - RNA, 22 nt, synthetic construct
  source 1..22: mol_type = other RNA
tgaggagcatataattatacat

SEQ ID NO: 20068 - RNA, 22 nt, synthetic construct
  source 1..22: mol_type = other RNA
tgagggagtggagaaaggcttc

SEQ ID NO: 20069 - RNA, 22 nt, synthetic construct
  source 1..22: mol_type = other RNA
tgaggggaaaaaagtaatgaat

SEQ ID NO: 20070 - RNA, 22 nt, synthetic construct
  source 1..22: mol_type = other RNA
tgagttagatcaatgctaaatg

SEQ ID NO: 20071 - RNA, 22 nt, synthetic construct
  source 1..22: mol_type = other RNA
tgatccattccaaaaaacactt

SEQ ID NO: 20072 - RNA, 22 nt, synthetic construct
  source 1..22: mol_type = other RNA
tgatctaactcaatgtggaaga

SEQ ID NO: 20073 - RNA, 22 nt, synthetic construct
  source 1..22: mol_type = other RNA
tgatgggcaagctgcttgtgac

SEQ ID NO: 20074 - RNA, 22 nt, synthetic construct
  source 1..22: mol_type = other RNA
tgatgtcttaatgtattgccca

SEQ ID NO: 20075 - RNA, 22 nt, synthetic construct
  source 1..22: mol_type = other RNA
tgattaactatgttcacctacc

SEQ ID NO: 20076 - RNA, 22 nt, synthetic construct
  source 1..22: mol_type = other RNA
tgatttatacagagtaccagag

SEQ ID NO: 20077 - RNA, 22 nt, synthetic construct
  source 1..22: mol_type = other RNA
tgatttcatttagcattgatct

SEQ ID NO: 20078 - RNA, 22 nt, synthetic construct
  source 1..22: mol_type = other RNA
tgattttaagagatttacaagt

SEQ ID NO: 20079 - RNA, 22 nt, synthetic construct
  source 1..22: mol_type = other RNA
tgattttcaatttcaagcaacg

SEQ ID NO: 20080 - RNA, 22 nt, synthetic construct
  source 1..22: mol_type = other RNA
tgcaagttaacacggcttaatg

SEQ ID NO: 20081 - RNA, 22 nt, synthetic construct
  source 1..22: mol_type = other RNA
tgcacgaatgtaaccttcttcc

SEQ ID NO: 20082 - RNA, 22 nt, synthetic construct
  source 1..22: mol_type = other RNA
tgcatacttaattcattacttt

SEQ ID NO: 20083 - RNA, 22 nt, synthetic construct
  source 1..22: mol_type = other RNA
tgcatcaccttatatgtcttaa

SEQ ID NO: 20084 - RNA, 22 nt, synthetic construct
  source 1..22: mol_type = other RNA
tgcatttctcaaactgtacttt

SEQ ID NO: 20085 - RNA, 22 nt, synthetic construct
  source 1..22: mol_type = other RNA
tgcccagaaaaggtaaggttgg

SEQ ID NO: 20086 - RNA, 22 nt, synthetic construct
  source 1..22: mol_type = other RNA
tgcccatcataagtttttctga

SEQ ID NO: 20087 - RNA, 22 nt, synthetic construct
  source 1..22: mol_type = other RNA
tgcccatgctggtctggaaata

SEQ ID NO: 20088 - RNA, 22 nt, synthetic construct
  source 1..22: mol_type = other RNA
tgctaaatgaaatcaaagaaat

SEQ ID NO: 20089 - RNA, 22 nt, synthetic construct
  source 1..22: mol_type = other RNA
tgctatggtgactacctgtttt

SEQ ID NO: 20090 - RNA, 22 nt, synthetic construct
  source 1..22: mol_type = other RNA
tgctcatttctttgatttcatt

SEQ ID NO: 20091 - RNA, 22 nt, synthetic construct
  source 1..22: mol_type = other RNA
tgctcctcattttttgtcacta

SEQ ID NO: 20092 - RNA, 22 nt, synthetic construct
  source 1..22: mol_type = other RNA
tgctcgttgaaggaacaatgga

SEQ ID NO: 20093 - RNA, 22 nt, synthetic construct
  source 1..22: mol_type = other RNA
tgctggtctggaaatactgggc

SEQ ID NO: 20094 - RNA, 22 nt, synthetic construct
  source 1..22: mol_type = other RNA
tgctgtattataaactacacat

SEQ ID NO: 20095 - RNA, 22 nt, synthetic construct
  source 1..22: mol_type = other RNA
tgctgtgttcctctggtactct

SEQ ID NO: 20096 - RNA, 22 nt, synthetic construct
  source 1..22: mol_type = other RNA
tgcttccagaagaaaacagttc

SEQ ID NO: 20097 - RNA, 22 nt, synthetic construct
  source 1..22: mol_type = other RNA
tgcttgagcccagtatttccag

SEQ ID NO: 20098 - RNA, 22 nt, synthetic construct
  source 1..22: mol_type = other RNA
tgcttgtgacattgaaggtatt

SEQ ID NO: 20099 - RNA, 22 nt, synthetic construct
  source 1..22: mol_type = other RNA
tggaaacagtgatccattccaa

SEQ ID NO: 20100 - RNA, 22 nt, synthetic construct
  source 1..22: mol_type = other RNA
tggaaatactgggctcaagcaa

SEQ ID NO: 20101 - RNA, 22 nt, synthetic construct
  source 1..22: mol_type = other RNA
tggaactgttttcttctggaag

SEQ ID NO: 20102 - RNA, 22 nt, synthetic construct
  source 1..22: mol_type = other RNA
tggaagaaggttacattcgtgc

SEQ ID NO: 20103 - RNA, 22 nt, synthetic construct
  source 1..22: mol_type = other RNA
tggaagcagacctagacttctt

SEQ ID NO: 20104 - RNA, 22 nt, synthetic construct
  source 1..22: mol_type = other RNA
tggaatggatcactgtttccaa

SEQ ID NO: 20105 - RNA, 22 nt, synthetic construct
  source 1..22: mol_type = other RNA
tggagaaaagggagtgaaatgt

SEQ ID NO: 20106 - RNA, 22 nt, synthetic construct
  source 1..22: mol_type = other RNA
tggagaaaggcttcagagagaa

SEQ ID NO: 20107 - RNA, 22 nt, synthetic construct
  source 1..22: mol_type = other RNA
tggatatgtggtcatctaggac

SEQ ID NO: 20108 - RNA, 22 nt, synthetic construct
  source 1..22: mol_type = other RNA
tggatcactgtttccaaaagaa

SEQ ID NO: 20109 - RNA, 22 nt, synthetic construct
  source 1..22: mol_type = other RNA
tgggaggccaaggtaaaagaat

SEQ ID NO: 20110 - RNA, 22 nt, synthetic construct
  source 1..22: mol_type = other RNA
tgggattttgtgacaatataca

SEQ ID NO: 20111 - RNA, 22 nt, synthetic construct
  source 1..22: mol_type = other RNA
tgggcaaatattggtatatata

SEQ ID NO: 20112 - RNA, 22 nt, synthetic construct
  source 1..22: mol_type = other RNA
tgggcaagctgcttgtgacatt

SEQ ID NO: 20113 - RNA, 22 nt, synthetic construct
  source 1..22: mol_type = other RNA
tgggcaatacattaagacatca

SEQ ID NO: 20114 - RNA, 22 nt, synthetic construct
  source 1..22: mol_type = other RNA
tgggctcaagcaattcttttac

SEQ ID NO: 20115 - RNA, 22 nt, synthetic construct
  source 1..22: mol_type = other RNA
tggtaaagagcctagaacacag

SEQ ID NO: 20116 - RNA, 22 nt, synthetic construct
  source 1..22: mol_type = other RNA
tggtactctgtataaatcaatg

SEQ ID NO: 20117 - RNA, 22 nt, synthetic construct
  source 1..22: mol_type = other RNA
tggtaggtgaacatagttaatc

SEQ ID NO: 20118 - RNA, 22 nt, synthetic construct
  source 1..22: mol_type = other RNA
tggtatatatagagttaagaag

SEQ ID NO: 20119 - RNA, 22 nt, synthetic construct
  source 1..22: mol_type = other RNA
tggtcatctaggaccaaactag

SEQ ID NO: 20120 - RNA, 22 nt, synthetic construct
  source 1..22: mol_type = other RNA
tggtcctagatgaccacatatc

SEQ ID NO: 20121 - RNA, 22 nt, synthetic construct
  source 1..22: mol_type = other RNA
tggtctggaaatactgggctca

SEQ ID NO: 20122 - RNA, 22 nt, synthetic construct
  source 1..22: mol_type = other RNA
tggtgactacctgtttttaaaa

SEQ ID NO: 20123 - RNA, 22 nt, synthetic construct
  source 1..22: mol_type = other RNA
tggtgttacggctctcaatgct

SEQ ID NO: 20124 - RNA, 22 nt, synthetic construct
  source 1..22: mol_type = other RNA
tggttaagacatataaggtgat

SEQ ID NO: 20125 - RNA, 22 nt, synthetic construct
  source 1..22: mol_type = other RNA
tgtaaccttcttccacattgag

SEQ ID NO: 20126 - RNA, 22 nt, synthetic construct
  source 1..22: mol_type = other RNA
tgtactttagttcttttggaaa

SEQ ID NO: 20127 - RNA, 22 nt, synthetic construct
  source 1..22: mol_type = other RNA
tgtagtttataatacagcaaag

SEQ ID NO: 20128 - RNA, 22 nt, synthetic construct
  source 1..22: mol_type = other RNA
tgtataattatatgctcctcat

SEQ ID NO: 20129 - RNA, 22 nt, synthetic construct
  source 1..22: mol_type = other RNA
tgtatattgtcacaaaatccca

SEQ ID NO: 20130 - RNA, 22 nt, synthetic construct
  source 1..22: mol_type = other RNA
tgtattataaactacacattca

SEQ ID NO: 20131 - RNA, 22 nt, synthetic construct
  source 1..22: mol_type = other RNA
tgtattgcccatgctggtctgg

SEQ ID NO: 20132 - RNA, 22 nt, synthetic construct
  source 1..22: mol_type = other RNA
tgtatttaactttgctgtatta

SEQ ID NO: 20133 - RNA, 22 nt, synthetic construct
  source 1..22: mol_type = other RNA
tgtcacaaaatcccatatatag

SEQ ID NO: 20134 - RNA, 22 nt, synthetic construct
  source 1..22: mol_type = other RNA
tgtcacaagcagcttgcccatc

SEQ ID NO: 20135 - RNA, 22 nt, synthetic construct
  source 1..22: mol_type = other RNA
tgtcactataattgttaatatg

SEQ ID NO: 20136 - RNA, 22 nt, synthetic construct
  source 1..22: mol_type = other RNA
tgtcattaaagacatttcactc

SEQ ID NO: 20137 - RNA, 22 nt, synthetic construct
  source 1..22: mol_type = other RNA
tgtctctgtgttctaggctctt

SEQ ID NO: 20138 - RNA, 22 nt, synthetic construct
  source 1..22: mol_type = other RNA
tgtcttaaccatccttgtatat

SEQ ID NO: 20139 - RNA, 22 nt, synthetic construct
  source 1..22: mol_type = other RNA
tgtcttaatgtattgcccatgc

SEQ ID NO: 20140 - RNA, 22 nt, synthetic construct
  source 1..22: mol_type = other RNA
tgtctttaatgacacttactat

SEQ ID NO: 20141 - RNA, 22 nt, synthetic construct
  source 1..22: mol_type = other RNA
tgtgacaatatacaaggatggt

SEQ ID NO: 20142 - RNA, 22 nt, synthetic construct
  source 1..22: mol_type = other RNA
tgtgacattgaaggtatttaag

SEQ ID NO: 20143 - RNA, 22 nt, synthetic construct
  source 1..22: mol_type = other RNA
tgtgctcgttgaaggaacaatg

SEQ ID NO: 20144 - RNA, 22 nt, synthetic construct
  source 1..22: mol_type = other RNA
tgtggaagaaggttacattcgt

SEQ ID NO: 20145 - RNA, 22 nt, synthetic construct
  source 1..22: mol_type = other RNA
tgtggtcatctaggaccaaact

SEQ ID NO: 20146 - RNA, 22 nt, synthetic construct
  source 1..22: mol_type = other RNA
tgtgtagtttataatacagcaa

SEQ ID NO: 20147 - RNA, 22 nt, synthetic construct
  source 1..22: mol_type = other RNA
tgtgtctctgtgttctaggctc

SEQ ID NO: 20148 - RNA, 22 nt, synthetic construct
  source 1..22: mol_type = other RNA
tgtgttcctctggtactctgta

SEQ ID NO: 20149 - RNA, 22 nt, synthetic construct
  source 1..22: mol_type = other RNA
tgtgttctaggctctttaccat

SEQ ID NO: 20150 - RNA, 22 nt, synthetic construct
  source 1..22: mol_type = other RNA
tgtgttctgtgtctctgtgttc

SEQ ID NO: 20151 - RNA, 22 nt, synthetic construct
  source 1..22: mol_type = other RNA
tgttaacttgcacgaatgtaac

SEQ ID NO: 20152 - RNA, 22 nt, synthetic construct
  source 1..22: mol_type = other RNA
tgttacggctctcaatgctgtg

SEQ ID NO: 20153 - RNA, 22 nt, synthetic construct
  source 1..22: mol_type = other RNA
tgttactaagctaacaaacttc

SEQ ID NO: 20154 - RNA, 22 nt, synthetic construct
  source 1..22: mol_type = other RNA
tgttagcttagtaacaattttg

SEQ ID NO: 20155 - RNA, 22 nt, synthetic construct
  source 1..22: mol_type = other RNA
tgttattaatctcctctttttg

SEQ ID NO: 20156 - RNA, 22 nt, synthetic construct
  source 1..22: mol_type = other RNA
tgttcacctaccaaccttacct

SEQ ID NO: 20157 - RNA, 22 nt, synthetic construct
  source 1..22: mol_type = other RNA
tgttcctctggtactctgtata

SEQ ID NO: 20158 - RNA, 22 nt, synthetic construct
  source 1..22: mol_type = other RNA
tgttccttcaacgagcacatgg

SEQ ID NO: 20159 - RNA, 22 nt, synthetic construct
  source 1..22: mol_type = other RNA
tgttctaggctctttaccatgt

SEQ ID NO: 20160 - RNA, 22 nt, synthetic construct
  source 1..22: mol_type = other RNA
tgttctgtgtctctgtgttcta

SEQ ID NO: 20161 - RNA, 22 nt, synthetic construct
  source 1..22: mol_type = other RNA
tgtttccaaaagaactaaagta

SEQ ID NO: 20162 - RNA, 22 nt, synthetic construct
  source 1..22: mol_type = other RNA
tgttttcttctggaagcagacc

SEQ ID NO: 20163 - RNA, 22 nt, synthetic construct
  source 1..22: mol_type = other RNA
tgttttttggaatggatcactg

SEQ ID NO: 20164 - RNA, 22 nt, synthetic construct
  source 1..22: mol_type = other RNA
ttaaaaacaggtagtcaccata

SEQ ID NO: 20165 - RNA, 22 nt, synthetic construct
  source 1..22: mol_type = other RNA
ttaaagacatttcactcccttt

SEQ ID NO: 20166 - RNA, 22 nt, synthetic construct
  source 1..22: mol_type = other RNA
ttaaagatgatgtcttaatgta

SEQ ID NO: 20167 - RNA, 22 nt, synthetic construct
  source 1..22: mol_type = other RNA
ttaaagttgaggggaaaaaagt

SEQ ID NO: 20168 - RNA, 22 nt, synthetic construct
  source 1..22: mol_type = other RNA
ttaaataccttcaatgtcacaa

SEQ ID NO: 20169 - RNA, 22 nt, synthetic construct
  source 1..22: mol_type = other RNA
ttaacaaaaagaggagattaat

SEQ ID NO: 20170 - RNA, 22 nt, synthetic construct
  source 1..22: mol_type = other RNA
ttaacacggcttaatgattaac

SEQ ID NO: 20171 - RNA, 22 nt, synthetic construct
  source 1..22: mol_type = other RNA
ttaaccatccttgtatattgtc

SEQ ID NO: 20172 - RNA, 22 nt, synthetic construct
  source 1..22: mol_type = other RNA
ttaactatgttcacctaccaac

SEQ ID NO: 20173 - RNA, 22 nt, synthetic construct
  source 1..22: mol_type = other RNA
ttaacttgcacgaatgtaacct

SEQ ID NO: 20174 - RNA, 22 nt, synthetic construct
  source 1..22: mol_type = other RNA
ttaactttgctgtattataaac

SEQ ID NO: 20175 - RNA, 22 nt, synthetic construct
  source 1..22: mol_type = other RNA
ttaagaagtctaggtctgcttc

SEQ ID NO: 20176 - RNA, 22 nt, synthetic construct
  source 1..22: mol_type = other RNA
ttaagacatataaggtgatgca

SEQ ID NO: 20177 - RNA, 22 nt, synthetic construct
  source 1..22: mol_type = other RNA
ttaagagatttacaagtcaaaa

SEQ ID NO: 20178 - RNA, 22 nt, synthetic construct
  source 1..22: mol_type = other RNA
ttaagattcaattctagtttgg

SEQ ID NO: 20179 - RNA, 22 nt, synthetic construct
  source 1..22: mol_type = other RNA
ttaagccgtgttaacttgcacg

SEQ ID NO: 20180 - RNA, 22 nt, synthetic construct
  source 1..22: mol_type = other RNA
ttaagtatgcatttctcaaact

SEQ ID NO: 20181 - RNA, 22 nt, synthetic construct
  source 1..22: mol_type = other RNA
ttaagttagttgctcatttctt

SEQ ID NO: 20182 - RNA, 22 nt, synthetic construct
  source 1..22: mol_type = other RNA
ttaatcattaagccgtgttaac

SEQ ID NO: 20183 - RNA, 22 nt, synthetic construct
  source 1..22: mol_type = other RNA
ttaatctcctctttttgttaaa

SEQ ID NO: 20184 - RNA, 22 nt, synthetic construct
  source 1..22: mol_type = other RNA
ttaatgacacttactatatatg

SEQ ID NO: 20185 - RNA, 22 nt, synthetic construct
  source 1..22: mol_type = other RNA
ttaatgattaactatgttcacc

SEQ ID NO: 20186 - RNA, 22 nt, synthetic construct
  source 1..22: mol_type = other RNA
ttaatgtattgcccatgctggt

SEQ ID NO: 20187 - RNA, 22 nt, synthetic construct
  source 1..22: mol_type = other RNA
ttaattcattacttttttcccc

SEQ ID NO: 20188 - RNA, 22 nt, synthetic construct
  source 1..22: mol_type = other RNA
ttacattcgtgcaagttaacac

SEQ ID NO: 20189 - RNA, 22 nt, synthetic construct
  source 1..22: mol_type = other RNA
ttaccatgtgctcgttgaagga

SEQ ID NO: 20190 - RNA, 22 nt, synthetic construct
  source 1..22: mol_type = other RNA
ttacccaacaaaaaagtttatt

SEQ ID NO: 20191 - RNA, 22 nt, synthetic construct
  source 1..22: mol_type = other RNA
ttacctattaagttagttgctc

SEQ ID NO: 20192 - RNA, 22 nt, synthetic construct
  source 1..22: mol_type = other RNA
ttaccttttctgggcaaatatt

SEQ ID NO: 20193 - RNA, 22 nt, synthetic construct
  source 1..22: mol_type = other RNA
ttacggctctcaatgctgtgtt

SEQ ID NO: 20194 - RNA, 22 nt, synthetic construct
  source 1..22: mol_type = other RNA
ttactaagctaacaaacttcag

SEQ ID NO: 20195 - RNA, 22 nt, synthetic construct
  source 1..22: mol_type = other RNA
ttactatatatgggattttgtg

SEQ ID NO: 20196 - RNA, 22 nt, synthetic construct
  source 1..22: mol_type = other RNA
ttacttttttcccctcaacttt

SEQ ID NO: 20197 - RNA, 22 nt, synthetic construct
  source 1..22: mol_type = other RNA
ttagatcaatgctaaatgaaat

SEQ ID NO: 20198 - RNA, 22 nt, synthetic construct
  source 1..22: mol_type = other RNA
ttagcattgatctaactcaatg

SEQ ID NO: 20199 - RNA, 22 nt, synthetic construct
  source 1..22: mol_type = other RNA
ttagcttagtaacaattttgat

SEQ ID NO: 20200 - RNA, 22 nt, synthetic construct
  source 1..22: mol_type = other RNA
ttagcttttaaaaacaggtagt

SEQ ID NO: 20201 - RNA, 22 nt, synthetic construct
  source 1..22: mol_type = other RNA
ttagttcttttggaaacagtga

SEQ ID NO: 20202 - RNA, 22 nt, synthetic construct
  source 1..22: mol_type = other RNA
ttagttgctcatttctttgatt

SEQ ID NO: 20203 - RNA, 22 nt, synthetic construct
  source 1..22: mol_type = other RNA
ttataaactacacattcaatgc

SEQ ID NO: 20204 - RNA, 22 nt, synthetic construct
  source 1..22: mol_type = other RNA
ttatacagagtaccagaggaac

SEQ ID NO: 20205 - RNA, 22 nt, synthetic construct
  source 1..22: mol_type = other RNA
ttatacattgatttatacagag

SEQ ID NO: 20206 - RNA, 22 nt, synthetic construct
  source 1..22: mol_type = other RNA
ttatagtgacaaaaaatgagga

SEQ ID NO: 20207 - RNA, 22 nt, synthetic construct
  source 1..22: mol_type = other RNA
ttatatgctcctcattttttgt

SEQ ID NO: 20208 - RNA, 22 nt, synthetic construct
  source 1..22: mol_type = other RNA
ttatatgtcttaaccatccttg

SEQ ID NO: 20209 - RNA, 22 nt, synthetic construct
  source 1..22: mol_type = other RNA
ttatcaaaattgttactaagct

SEQ ID NO: 20210 - RNA, 22 nt, synthetic construct
  source 1..22: mol_type = other RNA
ttatgatgggcaagctgcttgt

SEQ ID NO: 20211 - RNA, 22 nt, synthetic construct
  source 1..22: mol_type = other RNA
ttattaaagttgaggggaaaaa

SEQ ID NO: 20212 - RNA, 22 nt, synthetic construct
  source 1..22: mol_type = other RNA
ttattaatctcctctttttgtt

SEQ ID NO: 20213 - RNA, 22 nt, synthetic construct
  source 1..22: mol_type = other RNA
ttattattaaagttgaggggaa

SEQ ID NO: 20214 - RNA, 22 nt, synthetic construct
  source 1..22: mol_type = other RNA
ttatttttgacttgtaaatctc

SEQ ID NO: 20215 - RNA, 22 nt, synthetic construct
  source 1..22: mol_type = other RNA
ttcaaattacctattaagttag

SEQ ID NO: 20216 - RNA, 22 nt, synthetic construct
  source 1..22: mol_type = other RNA
ttcaacgagcacatggtaaaga

SEQ ID NO: 20217 - RNA, 22 nt, synthetic construct
  source 1..22: mol_type = other RNA
ttcaagcaacgtggaactgttt

SEQ ID NO: 20218 - RNA, 22 nt, synthetic construct
  source 1..22: mol_type = other RNA
ttcaatgctatggtgactacct

SEQ ID NO: 20219 - RNA, 22 nt, synthetic construct
  source 1..22: mol_type = other RNA
ttcaatgtcacaagcagcttgc

SEQ ID NO: 20220 - RNA, 22 nt, synthetic construct
  source 1..22: mol_type = other RNA
ttcaattctagtttggtcctag

SEQ ID NO: 20221 - RNA, 22 nt, synthetic construct
  source 1..22: mol_type = other RNA
ttcaatttcaagcaacgtggaa

SEQ ID NO: 20222 - RNA, 22 nt, synthetic construct
  source 1..22: mol_type = other RNA
ttcacctaccaaccttaccttt

SEQ ID NO: 20223 - RNA, 22 nt, synthetic construct
  source 1..22: mol_type = other RNA
ttcactcccttttctccactgt

SEQ ID NO: 20224 - RNA, 22 nt, synthetic construct
  source 1..22: mol_type = other RNA
ttcagaaaaacttatgatgggc

SEQ ID NO: 20225 - RNA, 22 nt, synthetic construct
  source 1..22: mol_type = other RNA
ttcagagagaaagtgttttttg

SEQ ID NO: 20226 - RNA, 22 nt, synthetic construct
  source 1..22: mol_type = other RNA
ttcattacttttttcccctcaa

SEQ ID NO: 20227 - RNA, 22 nt, synthetic construct
  source 1..22: mol_type = other RNA
ttcatttagcattgatctaact

SEQ ID NO: 20228 - RNA, 22 nt, synthetic construct
  source 1..22: mol_type = other RNA
ttccaaaaaacactttctctct

SEQ ID NO: 20229 - RNA, 22 nt, synthetic construct
  source 1..22: mol_type = other RNA
ttccaaaagaactaaagtacag

SEQ ID NO: 20230 - RNA, 22 nt, synthetic construct
  source 1..22: mol_type = other RNA
ttccacattgagttagatcaat

SEQ ID NO: 20231 - RNA, 22 nt, synthetic construct
  source 1..22: mol_type = other RNA
ttccacgttgcttgaaattgaa

SEQ ID NO: 20232 - RNA, 22 nt, synthetic construct
  source 1..22: mol_type = other RNA
ttccagaagaaaacagttccac

SEQ ID NO: 20233 - RNA, 22 nt, synthetic construct
  source 1..22: mol_type = other RNA
ttccagaccagcatgggcaata

SEQ ID NO: 20234 - RNA, 22 nt, synthetic construct
  source 1..22: mol_type = other RNA
ttcccctcaactttaataataa

SEQ ID NO: 20235 - RNA, 22 nt, synthetic construct
  source 1..22: mol_type = other RNA
ttcctctggtactctgtataaa

SEQ ID NO: 20236 - RNA, 22 nt, synthetic construct
  source 1..22: mol_type = other RNA
ttccttcaacgagcacatggta

SEQ ID NO: 20237 - RNA, 22 nt, synthetic construct
  source 1..22: mol_type = other RNA
ttcgtgcaagttaacacggctt

SEQ ID NO: 20238 - RNA, 22 nt, synthetic construct
  source 1..22: mol_type = other RNA
ttctaggctctttaccatgtgc

SEQ ID NO: 20239 - RNA, 22 nt, synthetic construct
  source 1..22: mol_type = other RNA
ttctagtttggtcctagatgac

SEQ ID NO: 20240 - RNA, 22 nt, synthetic construct
  source 1..22: mol_type = other RNA
ttctcaaactgtactttagttc

SEQ ID NO: 20241 - RNA, 22 nt, synthetic construct
  source 1..22: mol_type = other RNA
ttctccactccctcaggtggtg

SEQ ID NO: 20242 - RNA, 22 nt, synthetic construct
  source 1..22: mol_type = other RNA
ttctccactgtgttctgtgtct

SEQ ID NO: 20243 - RNA, 22 nt, synthetic construct
  source 1..22: mol_type = other RNA
ttctctctgaagcctttctcca

SEQ ID NO: 20244 - RNA, 22 nt, synthetic construct
  source 1..22: mol_type = other RNA
ttctgaagtttgttagcttagt

SEQ ID NO: 20245 - RNA, 22 nt, synthetic construct
  source 1..22: mol_type = other RNA
ttctggaagcagacctagactt

SEQ ID NO: 20246 - RNA, 22 nt, synthetic construct
  source 1..22: mol_type = other RNA
ttctgggcaaatattggtatat

SEQ ID NO: 20247 - RNA, 22 nt, synthetic construct
  source 1..22: mol_type = other RNA
ttctgtgtctctgtgttctagg

SEQ ID NO: 20248 - RNA, 22 nt, synthetic construct
  source 1..22: mol_type = other RNA
ttcttaactctatatataccaa

SEQ ID NO: 20249 - RNA, 22 nt, synthetic construct
  source 1..22: mol_type = other RNA
ttcttccacattgagttagatc

SEQ ID NO: 20250 - RNA, 22 nt, synthetic construct
  source 1..22: mol_type = other RNA
ttcttctggaagcagacctaga

SEQ ID NO: 20251 - RNA, 22 nt, synthetic construct
  source 1..22: mol_type = other RNA
ttctttgatttcatttagcatt

SEQ ID NO: 20252 - RNA, 22 nt, synthetic construct
  source 1..22: mol_type = other RNA
ttcttttggaaacagtgatcca

SEQ ID NO: 20253 - RNA, 22 nt, synthetic construct
  source 1..22: mol_type = other RNA
ttgaaattgtatttaactttgc

SEQ ID NO: 20254 - RNA, 22 nt, synthetic construct
  source 1..22: mol_type = other RNA
ttgaaggaacaatggatatgtg

SEQ ID NO: 20255 - RNA, 22 nt, synthetic construct
  source 1..22: mol_type = other RNA
ttgaaggtatttaagattcaat

SEQ ID NO: 20256 - RNA, 22 nt, synthetic construct
  source 1..22: mol_type = other RNA
ttgaatcttaaataccttcaat

SEQ ID NO: 20257 - RNA, 22 nt, synthetic construct
  source 1..22: mol_type = other RNA
ttgaatgtgtagtttataatac

SEQ ID NO: 20258 - RNA, 22 nt, synthetic construct
  source 1..22: mol_type = other RNA
ttgacttgtaaatctcttaaaa

SEQ ID NO: 20259 - RNA, 22 nt, synthetic construct
  source 1..22: mol_type = other RNA
ttgagaaatgcatacttaattc

SEQ ID NO: 20260 - RNA, 22 nt, synthetic construct
  source 1..22: mol_type = other RNA
ttgagagccgtaacaccacctg

SEQ ID NO: 20261 - RNA, 22 nt, synthetic construct
  source 1..22: mol_type = other RNA
ttgagcccagtatttccagacc

SEQ ID NO: 20262 - RNA, 22 nt, synthetic construct
  source 1..22: mol_type = other RNA
ttgaggggaaaaaagtaatgaa

SEQ ID NO: 20263 - RNA, 22 nt, synthetic construct
  source 1..22: mol_type = other RNA
ttgagttagatcaatgctaaat

SEQ ID NO: 20264 - RNA, 22 nt, synthetic construct
  source 1..22: mol_type = other RNA
ttgatctaactcaatgtggaag

SEQ ID NO: 20265 - RNA, 22 nt, synthetic construct
  source 1..22: mol_type = other RNA
ttgatttatacagagtaccaga

SEQ ID NO: 20266 - RNA, 22 nt, synthetic construct
  source 1..22: mol_type = other RNA
ttgatttcatttagcattgatc

SEQ ID NO: 20267 - RNA, 22 nt, synthetic construct
  source 1..22: mol_type = other RNA
ttgattttcaatttcaagcaac

SEQ ID NO: 20268 - RNA, 22 nt, synthetic construct
  source 1..22: mol_type = other RNA
ttgcacgaatgtaaccttcttc

SEQ ID NO: 20269 - RNA, 22 nt, synthetic construct
  source 1..22: mol_type = other RNA
ttgcatcaccttatatgtctta

SEQ ID NO: 20270 - RNA, 22 nt, synthetic construct
  source 1..22: mol_type = other RNA
ttgcccagaaaaggtaaggttg

SEQ ID NO: 20271 - RNA, 22 nt, synthetic construct
  source 1..22: mol_type = other RNA
ttgcccatcataagtttttctg

SEQ ID NO: 20272 - RNA, 22 nt, synthetic construct
  source 1..22: mol_type = other RNA
ttgcccatgctggtctggaaat

SEQ ID NO: 20273 - RNA, 22 nt, synthetic construct
  source 1..22: mol_type = other RNA
ttgctcatttctttgatttcat

SEQ ID NO: 20274 - RNA, 22 nt, synthetic construct
  source 1..22: mol_type = other RNA
ttgctgtattataaactacaca

SEQ ID NO: 20275 - RNA, 22 nt, synthetic construct
  source 1..22: mol_type = other RNA
ttgcttgagcccagtatttcca

SEQ ID NO: 20276 - RNA, 22 nt, synthetic construct
  source 1..22: mol_type = other RNA
ttggaaacagtgatccattcca

SEQ ID NO: 20277 - RNA, 22 nt, synthetic construct
  source 1..22: mol_type = other RNA
ttggaatggatcactgtttcca

SEQ ID NO: 20278 - RNA, 22 nt, synthetic construct
  source 1..22: mol_type = other RNA
ttggtaggtgaacatagttaat

SEQ ID NO: 20279 - RNA, 22 nt, synthetic construct
  source 1..22: mol_type = other RNA
ttggtatatatagagttaagaa

SEQ ID NO: 20280 - RNA, 22 nt, synthetic construct
  source 1..22: mol_type = other RNA
ttggtcctagatgaccacatat

SEQ ID NO: 20281 - RNA, 22 nt, synthetic construct
  source 1..22: mol_type = other RNA
ttgtatattgtcacaaaatccc

SEQ ID NO: 20282 - RNA, 22 nt, synthetic construct
  source 1..22: mol_type = other RNA
ttgtatttaactttgctgtatt

SEQ ID NO: 20283 - RNA, 22 nt, synthetic construct
  source 1..22: mol_type = other RNA
ttgtcacaaaatcccatatata

SEQ ID NO: 20284 - RNA, 22 nt, synthetic construct
  source 1..22: mol_type = other RNA
ttgtgacaatatacaaggatgg

SEQ ID NO: 20285 - RNA, 22 nt, synthetic construct
  source 1..22: mol_type = other RNA
ttgtgacattgaaggtatttaa

SEQ ID NO: 20286 - RNA, 22 nt, synthetic construct
  source 1..22: mol_type = other RNA
ttgttactaagctaacaaactt

SEQ ID NO: 20287 - RNA, 22 nt, synthetic construct
  source 1..22: mol_type = other RNA
ttgttagcttagtaacaatttt

SEQ ID NO: 20288 - RNA, 22 nt, synthetic construct
  source 1..22: mol_type = other RNA
ttgttccttcaacgagcacatg

SEQ ID NO: 20289 - RNA, 22 nt, synthetic construct
  source 1..22: mol_type = other RNA
tttaaaaacaggtagtcaccat

SEQ ID NO: 20290 - RNA, 22 nt, synthetic construct
  source 1..22: mol_type = other RNA
tttaaagatgatgtcttaatgt

SEQ ID NO: 20291 - RNA, 22 nt, synthetic construct
  source 1..22: mol_type = other RNA
tttaacaaaaagaggagattaa

SEQ ID NO: 20292 - RNA, 22 nt, synthetic construct
  source 1..22: mol_type = other RNA
tttaagagatttacaagtcaaa

SEQ ID NO: 20293 - RNA, 22 nt, synthetic construct
  source 1..22: mol_type = other RNA
tttaagattcaattctagtttg

SEQ ID NO: 20294 - RNA, 22 nt, synthetic construct
  source 1..22: mol_type = other RNA
tttaccatgtgctcgttgaagg

SEQ ID NO: 20295 - RNA, 22 nt, synthetic construct
  source 1..22: mol_type = other RNA
tttacccaacaaaaaagtttat

SEQ ID NO: 20296 - RNA, 22 nt, synthetic construct
  source 1..22: mol_type = other RNA
tttagcattgatctaactcaat

SEQ ID NO: 20297 - RNA, 22 nt, synthetic construct
  source 1..22: mol_type = other RNA
tttagttcttttggaaacagtg

SEQ ID NO: 20298 - RNA, 22 nt, synthetic construct
  source 1..22: mol_type = other RNA
tttatacagagtaccagaggaa

SEQ ID NO: 20299 - RNA, 22 nt, synthetic construct
  source 1..22: mol_type = other RNA
tttattattaaagttgagggga

SEQ ID NO: 20300 - RNA, 22 nt, synthetic construct
  source 1..22: mol_type = other RNA
tttcaagcaacgtggaactgtt

SEQ ID NO: 20301 - RNA, 22 nt, synthetic construct
  source 1..22: mol_type = other RNA
tttcaatttcaagcaacgtgga

SEQ ID NO: 20302 - RNA, 22 nt, synthetic construct
  source 1..22: mol_type = other RNA
tttcactcccttttctccactg

SEQ ID NO: 20303 - RNA, 22 nt, synthetic construct
  source 1..22: mol_type = other RNA
tttcatttagcattgatctaac

SEQ ID NO: 20304 - RNA, 22 nt, synthetic construct
  source 1..22: mol_type = other RNA
tttccaaaagaactaaagtaca

SEQ ID NO: 20305 - RNA, 22 nt, synthetic construct
  source 1..22: mol_type = other RNA
tttccagaccagcatgggcaat

SEQ ID NO: 20306 - RNA, 22 nt, synthetic construct
  source 1..22: mol_type = other RNA
tttcccctcaactttaataata

SEQ ID NO: 20307 - RNA, 22 nt, synthetic construct
  source 1..22: mol_type = other RNA
tttctcaaactgtactttagtt

SEQ ID NO: 20308 - RNA, 22 nt, synthetic construct
  source 1..22: mol_type = other RNA
tttctccactccctcaggtggt

SEQ ID NO: 20309 - RNA, 22 nt, synthetic construct
  source 1..22: mol_type = other RNA
tttctccactgtgttctgtgtc

SEQ ID NO: 20310 - RNA, 22 nt, synthetic construct
  source 1..22: mol_type = other RNA
tttctctctgaagcctttctcc

SEQ ID NO: 20311 - RNA, 22 nt, synthetic construct
  source 1..22: mol_type = other RNA
tttctgaagtttgttagcttag

SEQ ID NO: 20312 - RNA, 22 nt, synthetic construct
  source 1..22: mol_type = other RNA
tttctgggcaaatattggtata

SEQ ID NO: 20313 - RNA, 22 nt, synthetic construct
  source 1..22: mol_type = other RNA
tttcttctggaagcagacctag

SEQ ID NO: 20314 - RNA, 22 nt, synthetic construct
  source 1..22: mol_type = other RNA
tttctttgatttcatttagcat

SEQ ID NO: 20315 - RNA, 22 nt, synthetic construct
  source 1..22: mol_type = other RNA
tttgacttgtaaatctcttaaa

SEQ ID NO: 20316 - RNA, 22 nt, synthetic construct
  source 1..22: mol_type = other RNA
tttgagaaatgcatacttaatt

SEQ ID NO: 20317 - RNA, 22 nt, synthetic construct
  source 1..22: mol_type = other RNA
tttgatttcatttagcattgat

SEQ ID NO: 20318 - RNA, 22 nt, synthetic construct
  source 1..22: mol_type = other RNA
tttgcatcaccttatatgtctt

SEQ ID NO: 20319 - RNA, 22 nt, synthetic construct
  source 1..22: mol_type = other RNA
tttgcccagaaaaggtaaggtt

SEQ ID NO: 20320 - RNA, 22 nt, synthetic construct
  source 1..22: mol_type = other RNA
tttgctgtattataaactacac

SEQ ID NO: 20321 - RNA, 22 nt, synthetic construct
  source 1..22: mol_type = other RNA
tttggaaacagtgatccattcc

SEQ ID NO: 20322 - RNA, 22 nt, synthetic construct
  source 1..22: mol_type = other RNA
tttggaatggatcactgtttcc

SEQ ID NO: 20323 - RNA, 22 nt, synthetic construct
  source 1..22: mol_type = other RNA
tttggtcctagatgaccacata

SEQ ID NO: 20324 - RNA, 22 nt, synthetic construct
  source 1..22: mol_type = other RNA
tttgtgacaatatacaaggatg

SEQ ID NO: 20325 - RNA, 22 nt, synthetic construct
  source 1..22: mol_type = other RNA
tttgttagcttagtaacaattt

SEQ ID NO: 20326 - RNA, 22 nt, synthetic construct
  source 1..22: mol_type = other RNA
ttttaaaaacaggtagtcacca

SEQ ID NO: 20327 - RNA, 22 nt, synthetic construct
  source 1..22: mol_type = other RNA
ttttaaagatgatgtcttaatg

SEQ ID NO: 20328 - RNA, 22 nt, synthetic construct
  source 1..22: mol_type = other RNA
ttttaagagatttacaagtcaa

SEQ ID NO: 20329 - RNA, 22 nt, synthetic construct
  source 1..22: mol_type = other RNA
ttttcaatttcaagcaacgtgg

SEQ ID NO: 20330 - RNA, 22 nt, synthetic construct
  source 1..22: mol_type = other RNA
ttttcccctcaactttaataat

SEQ ID NO: 20331 - RNA, 22 nt, synthetic construct
  source 1..22: mol_type = other RNA
ttttctccactgtgttctgtgt

SEQ ID NO: 20332 - RNA, 22 nt, synthetic construct
  source 1..22: mol_type = other RNA
ttttctgaagtttgttagctta

SEQ ID NO: 20333 - RNA, 22 nt, synthetic construct
  source 1..22: mol_type = other RNA
ttttctgggcaaatattggtat

SEQ ID NO: 20334 - RNA, 22 nt, synthetic construct
  source 1..22: mol_type = other RNA
ttttcttctggaagcagaccta

SEQ ID NO: 20335 - RNA, 22 nt, synthetic construct
  source 1..22: mol_type = other RNA
ttttgacttgtaaatctcttaa

SEQ ID NO: 20336 - RNA, 22 nt, synthetic construct
  source 1..22: mol_type = other RNA
ttttgcatcaccttatatgtct

SEQ ID NO: 20337 - RNA, 22 nt, synthetic construct
  source 1..22: mol_type = other RNA
ttttggaaacagtgatccattc

SEQ ID NO: 20338 - RNA, 22 nt, synthetic construct
  source 1..22: mol_type = other RNA
ttttggaatggatcactgtttc

SEQ ID NO: 20339 - RNA, 22 nt, synthetic construct
  source 1..22: mol_type = other RNA
ttttgtgacaatatacaaggat

SEQ ID NO: 20340 - RNA, 22 nt, synthetic construct
  source 1..22: mol_type = other RNA
tttttcccctcaactttaataa

SEQ ID NO: 20341 - RNA, 22 nt, synthetic construct
  source 1..22: mol_type = other RNA
tttttctgaagtttgttagctt

SEQ ID NO: 20342 - RNA, 22 nt, synthetic construct
  source 1..22: mol_type = other RNA
tttttgacttgtaaatctctta

SEQ ID NO: 20343 - RNA, 22 nt, synthetic construct
  source 1..22: mol_type = other RNA
tttttgcatcaccttatatgtc

SEQ ID NO: 20344 - RNA, 22 nt, synthetic construct
  source 1..22: mol_type = other RNA
tttttggaatggatcactgttt

SEQ ID NO: 20345 - RNA, 22 nt, synthetic construct
  source 1..22: mol_type = other RNA
ttttttcccctcaactttaata

SEQ ID NO: 20346 - RNA, 22 nt, synthetic construct
  source 1..22: mol_type = other RNA
ttttttgcatcaccttatatgt

SEQ ID NO: 20347 - RNA, 22 nt, synthetic construct
  source 1..22: mol_type = other RNA
ttttttggaatggatcactgtt

SEQ ID NO: 20348 - RNA, 20 nt, synthetic construct
  source 1..20: mol_type = other RNA
aaaaaaatgtacttggttcc

SEQ ID NO: 20349 - RNA, 17 nt, synthetic construct
  source 1..17: mol_type = other RNA
aaaatgtacttggttcc

SEQ ID NO: 20350 - RNA, 17 nt, synthetic construct
  source 1..17: mol_type = other RNA
aaaaatgtacttggttc

SEQ ID NO: 20351 - RNA, 17 nt, synthetic construct
  source 1..17: mol_type = other RNA
aaaaaatgtacttggtt

SEQ ID NO: 20352 - RNA, 17 nt, synthetic construct
  source 1..17: mol_type = other RNA
aaaaaaatgtacttggt

SEQ ID NO: 20353 - protein, 1091 aa, synthetic construct
MNYIIGLDIGITSVGYAVLMLNDNDIPCRILKMGSRIFEIAENPKDGSSLAAPRRINRGMRRRLRRRRFRKEQIRNLIIQNNIMTNDEIISIYNSGKELTDIYKIRCEALDRELDKEEFVRLLIHLSQRRGFKSNRKVDASDSKSEAGKLLNAVKTNKTLMEEKGYRTIGEMLYKDECFADVKRNKADDYSNTFARSEFEAEINAFFDAQQKFGNEYANDEMRDSYLKIYLSQRAFDEGPGGNSPYGGNQIEKMLGKCTFEPDEFRSVKAAYSFEYFNLLTKVNSLKLITPEEKRFLTKEEKDKIINLAFSKKTISYASIRKELGILADTYFNISYGKGDITPEETEKKTKFTYLNAFHVFRKAYGDVFLNWSKDKKNSLGYALTVYKNDSKIVDYLNNKGFDKAEIDIALTLPSFSKTGNLSIKALDKLIPFLEQGMLYNEACAAAGYNFKNDDTSKRKFLPANEEDAPELGDIRNPVVRRSVSQTIKVINAIIRKYGESPTLVNIELARELSKAKKDRDKIEKNQKDNRSRNEAIVEELKNTFHILQPTGQDVVKYKLWKEQDGICPYSLKSISLDKLFDVGYTDIDHIIPYSVSFDDTYNNKVLVLSSENRQKGNRLPMEYLKGKKRDEFWLWVDNSNLRSRKKKNLLKEQITEEDISGFKKRNLQDTQYISRFLLSYLKKYLELQPNGSAIKNTIKAVNGAATAYVRKRWGINKIRENGDIHHAVDAVVIGCITNPMIKKISEYSKYRELEFVNPHTDEILDIDTRTGELVNRFPMPYDWFRDEFIMRTSSDPTRVLHEKPLPNYATDEEVSPIFVSRMPKRKVSGAAHKDTIRRKYVNEVGLEYTVSKVPLSSLRLKNGEIEGYFNPSSDMLLYNALKSRLAMYDGDGKKAFADSTEPFRKPKHDGTDGPIVKKVKIQNKATLSVQVQNKTAIADNGSMVRVDVFFVENEGYYLVPVYVSDTVALDLPNRAIVGGKPYSKWKEMDNDNFVFSLYPNDLIKVKSKRDMKFNLVNPDSTLAKNYTARESMLYYKGTDISTAAITAINHDNTYKLRGLGVKSLLSIEKYSVDVLGNKTKVNKEKRMGFV

SEQ ID NO: 20354 - protein, 1348 aa, synthetic construct
MSIKSDYFLGLDIGTDSIGWAVTDPEYHILRRKGKALWGIRLFDAANTAAERRTFRTSRRRIQRRRQRIRLLQELFAEEMVKLDPGFFQRLSDSAFWQEDKQEQQIYSLFTCENYTDVDYYREYPTIYHLRSALIQEKKEFDLRLLYLALHHLMKHRGHFLFNGSINNVTSFHTTFQTFADCLYDEFDIELECDSEDRFAEILKDKHARKTGKCSELEIICHIEKSNKQLKELFKLITGMKASLSVVFGDDELAEIEHNKISFSESSYDEVRLALEDEIQERTGILDIFHAVYSWAILADILEGGEYEGNSYLSVAKVSTYKKHGDDLRLLRTLVREYCPDHYKSFFSVSGKENYCAYAGTLKKNGKKQPIKRCSQEDFYKALKKLLNQMPTEQPEVKDIFIEIENGTFLPLQVSKDNGVIPYQVNKMELEKILQNAEEYLPFLKNIDEECGKTVSKKIIDLFEFRIPYYVGPLNTAKGENCWMVRKEAGRIYPWNFDEKVDRDQSAEKFIRRMTNQCTYLIHEDVVPKNSLLYSEFMVLNELNNVKIRSEKLPVELKQAIVLDLFKKQKQITGKKLLNYLNANGYDVKKEDLSGFDGNFKSSLSSYLTLKKVFGEELDKYSVQQMAEDIILWITLYGDDQKMLRRVIRKHYEQQLSEEQILSLSKLKFQGWGRLSRRLLSEMEGVDCETGECMTVMQGLRNTQNNLMQLLSQQFSFMELIEEENGNYYVDEITYDNLVKDMVISPSVKRAVWQTVQIVEEIKGVMGCQPKKIFVEMARSDEEKKRTVSRKDRLLEAYDAIKDEARQWQEELQKYSDGDFKAIKLYLYYTQMGQCMYTGRKIDLSQLNDATVWDRDHIYPQSKTKDDSLDNLVLVDRSVNAKKSDGMLSPEIQQRMRATWKYLKEKKLISEKKYERLTRVSPLTDEELAGFINRQLVETRQSSKAVATLLKRVYDEAEIVYVKAEAVSNFRRDNLDYIKVRDLNDYHHAKDAYQNIVVGNVFHEKFTSNPLRWLKNNPNTKYSLNQMFNFDLEKNGVVIWKRGKAGSIKCVEETLKRNDILFTRYAFCNKGGFFNQMLTAAPEDKTKAKGLVPIKKGMETWKYGGYTSVTPSHFMLVASKDKKGKEIRTIETVPLYRWKEFKENPDALLQYCREFYGLKEPKVLIPCIKKNARLVVNGFPMHLKGSTGKQLILQGAVQLCLNNENIKYLKKVTKYLEYNAQRRDKRTLLEVREVTGINKEENIQLYDVFVDKLSNTIYQYRPANPKDNLIKGREKFIELGLAEQCVVLGEVLHLFQCKPLTSDLTLIGGSPNTGTIKITKTISNCNVVKLLSQSIAGVKVREINLLII

SEQ ID NO: 20355 - RNA, 99 nt, synthetic construct
  source 1..99: mol_type = other RNA
gttgtagttccctatttgtgaaaacaattaggttactatgataaggtagtataccgcaaagctctaacgccccgtctttgacggggcgttatctttttt

SEQ ID NO: 20356 - RNA, 107 nt, synthetic construct
  source 1..107: mol_type = other RNA
gtttgagagtagtgtaagaaattacactacaagttcaaataaaaatttattcaaatccatttgctacattgtgtagaatttaaagatctggcaacagatcttttttt

SEQ ID NO: 20357 - RNA, 79 nt, synthetic construct
  source 1..79: mol_type = other RNA
gtttgagagtagtggaaacactacaagttcaaataaaaatttattcaaatccatttgctacattgtgtagaattttttt

SEQ ID NO: 20358 - RNA, 22 nt, synthetic construct
  source 1..22: mol_type = other RNA
agggctttggaggagcagctaa

SEQ ID NO: 20359 - RNA, 22 nt, synthetic construct
  source 1..22: mol_type = other RNA
atggcctcctgcagctgggtca

SEQ ID NO: 20360 - protein, 1370 aa, synthetic construct
MTKVKDYYIGLDIGTSSVGWAVTDEAYNVLKFNSKKMWGVRLFDDAKTAEERRGQRGARRRLDRKKERLSLLQDFFAEEVAKVDPNFFLRLDNSDLYMEDKDQKLKSKYTLFNDKDFKDKNFHKKYPTIHHLLMDLIEDDSKKDIRLVYLACHYLLKNRGHFIFEGQKFDTKSSFENSLNELKVHLNDEYGLDLEFDNENLINILTDPKLNKTAKKKELKSVIGDTKFLKAVSAIMIGSSQKLVDLFENPEDFDDSAIKSVDFSTTSFDDKYSDYELALGDKIALVNILKEIYDSSILENLLKEADKSKDGNKYISNAFVKKYNKHGQDLKEFKRLVRQYHKSAYFDIFRSEKVNDNYVSYTKSSISNNKRVKANKFTDQEAFYKFAKKHLETIKYKINKVNGSKADLELIDGMLRDMEFKNFMPKIKSSDNGVIPYQLKLMELNKILENQSKHHEFLNVSDEYGSVCDKIASIMEFRIPYYVGPLNPNSKYAWIKKQKDSEITPWNFKDVVDLDSSREEFIDSLIGRCTYLKDEKVLPKASLLYNEYMVLNELNNLKLNDLPITEEMKKKIFDQLFKTRKKVTLKAVANLLKKEFNINGEILLSGTDGDFKQGLNSYNDFKAIVGDKVDSDDYRDKIEEIIKLIVLYGDDKSYLQKKIKAGYGKYFTDSEIKKMAGLNYKDWGRLSKKLLTGLEGANKITGERGSIIHFMREYNLNLMELMSASFTFTEEIQKLNPVDDRKLSYEMVDELYLSPSVKRMLWQSLRIVDEIKNIMGTDSKKIFIEMARGKEEVKARKESRKNQLLKFYKDGKKAFISEIGEERYSYLLSEIEGEEENKFRWDNLYLYYTQLGRCMYSLEPIDISELSSKNIYDQDHIYPKSKIYDDSIENRVLVKKDLNSKKGNSYPIPDEILNKNCYAYWKILYDKGLIGQKKYTRLTRRTGFTDDELVQFISRQIVETRQATKETANLLKTICKNSEIVYSKAENASRFRQEFDIVKCRAVNDLHHMHDAYINIIVGNVYNTKFTKDPMNFVKKQEKARSYNLENMFKYDVKRGGYTAWIADDEKGTVKNASIKRIRKELEGTNYRFTRMNYIESGALFNATLQRKNKGSRPLKDKGPKSSIEKYGGYTNINKACFAVLDIKSKNKIERKLMPVEREIYAKQKNDKKLSDEIFSKYLKDRFGIEDYRVVYPVVKMRTLLKIDGSYYFITGGSDKTLELRSALQLILPKKNEWAIKQIDKSSENDYLTIERIQDLTEELVYNTFDIIVNKFKTSVFKKSFLNLFQDDKIENIDFKFKSMDFKEKCKTLLMLVKAIRASGVRQDLKSIDLKSDYGRLSSKTNNIGNYQEFKIINQSITGLFENEVDLLKL

SEQ ID NO: 20361 - protein, 1062 aa, synthetic construct
MEKRLGLDIGTNSIGWCLYEGDSILDIGVRIFSDGRDPKSGASLAVDRRNARAMRRRRDRYLGRRSALIKALKAHGLFPAEQDAAKALEREDPYSLRVRALDHRLDPHQIGRAIFHLNQRRGFRSNRKADRVLGDQESGLISTATRVLDEAMAKSGARTLGEFLASRDTRRVRMRPDVKGYDFYPNRQHYLEEFEKIWDAQSQYHPDLLSQQAKSAIHRIIFHQRPLKPQAVGTCTFAGLHGIPGDETRLPKAHPLFQQRRLYEEVNQLEIVCASAPARKLTRDERDALILKLQDKKKVTFSTLARTIRLKEGERFNKESENRKDLAGDEVRAEMSDKTRFGRRWFHLSLDEQWSVIDRLLNEESTEDLLAWLEKEWSLPSDVAEAVANAHLPDGHGRFGLTATVRLLEHLKADVVTYAEAARRAGFHHSDFRDGACYDELPYYGEILSREIAPGKDEYGDPLERQWGKITNPTVHIGLNQLRRLINALVRRHGRPDFIFVELARELKLNEKQKADHKRRIKQTTDAARARAEKLREIGQRDSGSNRMLLRIWEELNPSNPLDRRCPYCAEPISIEMLMSGSADIDHIVPYSRCLDDSAANKVVAHNHCNRQKGNRTPWEQWGQTTRWPLIQEQVARMHRSKQWRFGPDAMERVDRDGGFIARQLTDTQYLSRIAAQYLSALYTPDEGRRVYAVTGRLTAMLRRLWGLNDILPDHNWVLNPHSNAPKNRLDHRHHAIDAAVVGATTPAMIQQVARAAARAEEQDLDRLFADLPPPWPGFREELQGRIMAAVVSHKPDHGRKGRPLPGRDSTSGRLHNDTAYGFTGRRNAKGMPIVVTRKPLLALKPEDLTDPERIPDPALQGALFEATRGATGKDFEKALRDFSRRDGPYQGIRRIRLTEALNVIPIRDRTGHAYKGVKGDANARFDVWRLPDGKWITRWKDRDGIEHSGIVSLFDAHQPSQVYHRPHPAAKKVLSLRQNDLVAVEHDGDPGKIMRVVKFSANGSITFAPHNEAGPLKTRDTDPADPFRYVTTVASGLKKMRARQVRIDELGKVHDPGPRED

SEQ ID NO: 20362 - protein, 1097 aa, synthetic construct
MGKIIGLDIGIASVGWAVLDKDSYKIVEAGSNIFPAAEASKNQERREFRGLRRMTRRRRTRLDDFKKLWKNYYKNEYSVTPNNVTELKVKGLSEQLSELELYTVLYSYLKHRGISYLEDAVDEGKTGSDYLKGLQTNQKEMNTKFPSQIQYERLEKYGCFRGENKVSDDEVLSNVFTTSAYKKEIEELISVQDNLGNELDKDFIKKYFEIFSRKRKYYEGPGNELSRTDYGIYTTKIDENGNYITDKNLFEKLIGKCSVYPEEMRASAASYTAQEFNALNDLNNLIVNGRKLTKEEKISIIECYKTEKTINVRKIIKNVIGENIDQLSGYRMDKNDKELYHTFEVYNKLRKAFEEAGISFDFSREDFDEIGRILTLNIEREGIEDAIRISNLVLSSDAVDVLISVRKKNASLFSKWHSFSLKIMNELIPEMYEQPKNQMELLSDMKSIKSKMDEFKGLEDIPVETIIEDIYNPVVKRSIRITIKIINALKKKYSDIEKIVIEMPRDKNSDEEKERIKKFQKDQENELPNIIKRVKDEYGITLTPELIARKKGLAFKLKLWNEQNGRCPYSGRMIDIESLINDGDLFEVDHIIPLSISFDDSRSNKTLVYRVENQEKKNNTPFMYLSRLNRQWNYDKFAAFIKELYGSSGKDRKKFRKKMNNFLFTEDINKIDVLKGFINRNINDTRYASRVVLNSLQGYFRANDNNVKVSVINGSFTHQMRVNLSLGKDRDESFAHHAVDAMLIALSQMGYDAFRARQKDIVDFETGEIINGSAWENQDEMYKTVLYQEKWKNIKDNIIEAEPNIKYWHKVDKKCNRGLCNQTIYSTRKCDDKIWKVDKLNIRDKDDVKKLIYMIQNGKEDKILMAQNDPKTFANLKYILDEYSDCENPFVSYEKETGDLVRKYSKKHNGPKITYLKYMVEEVNSCIDISHKYGHEKGSKKVFLAQLVPFRTDVYYNNNSGKYYLIGIKQSDIKCKGNQYIIDEEKYTDNLIQNGLLKEGQKIEDLEKLGYLFKFSIFKNDTIEFEKKGELIKCRFLSQNSASKNRIEVKPIGKKDYESRNLPTLSTTTVINKYVKDILGNEKQVSGEKFEIIVDSK